(19) United States
(12) Patent Application Publication
(10) Pub. No.: US 2024/0189423 A1
(43) Pub. Date: Jun. 13, 2024

(54) BISPECIFIC BINDING AGENT-LIGAND FUSIONS FOR THE DEGRADATION OF TARGET PROTEINS

(71) Applicant: The Regents of the University of California, Oakland, CA (US)

(72) Inventors: James A. WELLS, San Francisco, CA (US); Katarina PANCE, San Francisco, CA (US); Josef A. GRAMESPACHER, San Francisco, CA (US); Kaan Kumru, San Francisco, CA (US)

(21) Appl. No.: 18/553,447

(22) PCT Filed: Mar. 30, 2022
(86) PCT No.: PCT/US22/22672

§ 371 Date: Sep. 29, 2023

Related U.S. Application Data
(60) Provisional application No. 63/168,554, filed on Mar. 31, 2021.

(51) Int. Cl. A61K 39/00; A61K 47/68; A61P 35/00; C07K 14/475; C07K 14/48; C07K 14/49; C07K 14/495; C07K 14/50; C07K 14/505; C07K 14/51; C07K 14/52; C07K 14/525; C07K 14/53; C07K 14/54; C07K 14/55; C07K 14/56; C07K 14/565; C07K 14/57; C07K 14/575; C07K 14/61; C07K 14/65; C07K 16/28; C12N 5/0781

(52) U.S. Cl. CPC A61K 39/4644; A61K 39/4612; A61K 39/4633; A61K 47/6851; A61P 35/00; C07K 14/475; C07K 14/48; C07K 14/49; C07K 14/495; C07K 14/50; C07K 14/505; C07K 14/51; C07K 14/521; C07K 14/525; C07K 14/53; C07K 14/5403; C07K 14/5406; C07K 14/5409; C07K 14/5412; C07K 14/5418; C07K 14/5425; C07K 14/5431; C07K 14/5434; C07K 14/5437; C07K 14/55; C07K 14/56; C07K 14/565; C07K 14/57; C07K 14/575; C07K 14/61; C07K 14/65; C07K 16/2803; C07K 16/2887; C12N 5/0635; C07K 2317/31; C07K 2319/30; C12N 2510/00

(57) ABSTRACT

The present disclosure relates to targeted degradation platform technology. For example, the present disclosure relates to bispecific binding agents for degrading endogenous proteins, whether membrane-associated or soluble, using the lysosome pathway. The disclosure also provides methods useful for producing such agents, nucleic acids encoding same, host cells genetically modified with the nucleic acids, as well as methods for modulating an activity of a cell and/or for the treatment of various disorders.

### CROSS-REFERENCE TO RELATED APPLICATIONS

[0001] This application claims priority to U.S. Provisional Patent Application No. 63/168,554, filed Mar. 31, 2021, the disclosure of which is incorporated by reference herein in its entirety, including any drawings.

### STATEMENT REGARDING FEDERALLY-SPONSORED RESEARCH AND DEVELOPMENT

[0002] This invention was made with government support under grant nos. R35 GM122451 and R01 CA248323 awarded by The National Institutes of Health. The government has certain rights in the invention.

### FIELD

[0003] The present disclosure relates to targeted degradation platform technology. For example, the present disclosure relates to bispecific binding agents for degrading endogenous proteins, whether membrane-associated or soluble, using the lysosome pathway. The disclosure also provides methods useful for producing such agents, nucleic acids encoding same, host cells genetically modified with the nucleic acids, as well as methods for modulating an activity of a cell and/or for the treatment of various disorders.

### BACKGROUND

[0004] The small molecule targeted degradation field has demonstrated that, in many cases, degradation of a target protein is more efficacious than inhibition. However, all of the E3 ligases targeted by small molecule degraders reside within cells, thereby limiting the intracellular mechanisms of action by small molecule degraders. As such, few examples exist of cell surface or extracellular proteins being targeted for degradation. Recently, lysosome targeting chimeras (LYTACs) consisting of antibody-glycan conjugates demonstrated successful degradation of cell surface and extracellular proteins via recruitment of mannose-6-phosphate receptor, which shuttles the target protein to the lysosome for degradation. However, the non-recombinant nature of these antibody-glycan conjugates and multi-step glycan synthesis make them difficult to express and manufacture on a large scale.

[0005] The disclosure provided herein overcomes the limitations of both small molecule degraders and LYTACs due to the ability to target cell surface proteins and the ease of the recombinant one-step production of our bispecific binding agent-ligand fusions. Further, the disclosure provided herein can improve the clinical efficacy of already approved antagonistic and inhibitory antibodies. In addition, the disclosure provided herein utilizes a mechanism of action independent of ubiquitin transfer and is capable of degrading soluble extracellular proteins or proteins with small intracellular domains that do not contain accessible lysine residue.

### BRIEF SUMMARY

[0006] The present disclosure demonstrates the development of a new targeted degradation platform technology, termed cytokine receptor targeting chimeras (KineTACs), which comprise of fully recombinant bispecific binding agents that utilize CXCL12-mediated internalization of its cognate receptors to target various therapeutically relevant cell surface proteins for lysosomal degradation.

[0007] Provided herein, among others, includes a bispecific binding agent comprising: a first binding domain comprising a cytokine selected from the group consisting of CXCL12, CCL1, CCL2, CCL3, CCL3L1, CCL4, CC4L1, CCL5, CCL7, CCL8, CCL11, CCL13, CCL14, CCL15, CCL16, CCL17, CCL18, CCL19, CCL20, CCL21, CCL22, CCL23, CCL24, CCL25, CCL26, CCL27, CCL28, CXCL11, CXCL1, CXCL2, CXCL3, CXCL4, CXCL5, CXCL6, CXCL7, CXCL8, CXCL9, CXCL10, CXCL13, CXCL14, CXCL16, CXCL17, CX3CL1, XCL1, XCL2, vMIPII, vCXC1 that specifically binds to at least one endogenous cell surface receptor, and a second binding domain that specifically binds to a target protein. In some embodiments, the endogenous cell surface receptor is membrane associated. In some embodiments, the binding of the first binding domain to the at least one endogenous cell surface receptor results in the internalization of the target protein bound to the bispecific binding agent.

[0008] Provided herein, among others, includes a bispecific binding agent comprising: a first binding domain that specifically binds to at least one endogenous cell surface receptor, and a second binding domain that specifically binds to a target protein. In some embodiments, the endogenous cell surface receptor is membrane associated. In some embodiments, the binding of the first binding domain to the at least one endogenous cell surface receptor results in the internalization of the target protein bound to the bispecific binding agent.

[0009] In some embodiments, the first binding domain specifically binds to one endogenous cell surface receptor. In some embodiments, the first binding domain specifically binds to no more than two endogenous cell surface receptors. In some embodiments, the at least one endogenous cell surface receptor comprises targeting receptors and recycling receptors. In some embodiments, the at least one endogenous cell surface receptor comprises single-pass and multi-pass membrane proteins. In certain embodiments, the at least one endogenous cell surface receptor comprises at least one cytokine receptor. In other embodiments, the at least one cytokine receptor comprises at least one chemokine receptor. In some specific embodiments, the at least one chemokine receptors are selected from the group consisting of CXCR1, CXCR2, CXCR3, CXCR4, CXCR5, CXCR6, CXCR7 (or ACKR3), XCR1, XCR2, CCR1, CCR2, CCR3, CCR4, CCR5, CCR6, CCR7, CCR8, CCR9, CCR10, CCR11, CX3CR1, ACKR1, ACKR2, ACKR4, and ACKR5.

[0010] In one embodiment, the at least one chemokine receptors are selected from the group consisting of CCR1, CCR2, CCR3, CCR4, CCR5, CCR6, CCR7, CCR8, CCR9, CCR10, and CCR11.

[0011] In one embodiment, the at least one chemokine receptors are selected from the group consisting of CXCR7, CXCR4, CXCR3, CXCR1, CXCR2, CXCR5, CXCR6, CX3CR1, XCR1, and XCR2.

[0012] In one embodiment, the at least one chemokine receptors are selected from the group consisting of ACKR1, ACKR2, CXCR7, and ACKR4.

[0013] In one embodiment, the at least one cytokine receptor comprises at least one interleukin receptor. In one embodiment, the at least one interleukin receptors are selected from the group consisting of CD25, IL2RB, IL2RG, IL3RA, IL4R, IL13RA1, IL13RA2, IL5RA, IL6R, IL7R, IL8R, IL9R, IL10RA, IL10RB, IL11RA, IL12RB1, IL12RB2, IL15RA, CD4, IL17RA, IL17RC, IL17RB, IL17RE, IL27RA, IL18R1, and IL20RA.

[0014] In one embodiment, the at least one cytokine receptor comprises at least one interferon receptor. In one embodiment, the at least one interferon receptors are selected from the group consisting of IFNAR1, IFNAR2, IFNGR1, and IFNGR2.

[0015] In one embodiment, the at least one cytokine receptor comprises at least one prolactin receptor. In one embodiment, the at least one prolactin receptors are selected from the group consisting of EPOR, GHR, PRLR, CSF3R, LEPR, and CSF1R.

[0016] In one embodiment, the at least one cytokine receptor comprises at least one TNF receptor. In one embodiment, the at least one TNF receptors are selected from the group consisting of TNFR1, TNFR2, DR4, DR5, DCR1, DCR2, DR3, LTBR, BAFFR, TACI, OPG, RANK, CD40, EDAR, DCR3, FAS, and CD27.

[0017] In one embodiment, the at least one endogenous cell surface receptor comprises at least one growth factor receptor. In one embodiment, the at least one growth factor receptors are selected from the group consisting of FGFR2B, VEGFR2, PDGFRA, PDGFRB, NGFR, TRKC, TRKB, M6PR, and IGF1R.

[0018] In certain embodiments, the binding of the first binding domain to the at least one endogenous cell surface receptor results in the degradation of the target protein bound to the bispecific binding agent.

[0019] In some embodiments, the first binding domain comprises a cytokine, a chemokine, a growth factor or an isoform or a derivative capable of binding thereof. In some embodiments, the chemokine comprises a CXC chemokine, CCL chemokine, viral chemokine, or an isoform or a derivative capable of binding thereof. In certain embodiments, the chemokine is selected from the group consisting of CCL1, CCL2, CCL3, CCL3L1, CCL4, CC4L1, CCL5, CCL7, CCL8, CCL11, CCL13, CCL14, CCL15, CCL16, CCL17, CCL18, CCL19, CCL20, CCL21, CCL22, CCL23, CCL24, CCL25, CCL26, CCL27, and CCL28. In one embodiment, the chemokine is selected from the group consisting of CXCL12, CXCL11, CXCL1, CXCL2, CXCL3, CXCL4, CXCL5, CXCL6, CXCL7, CXCL8, CXCL9, CXCL10, CXCL13, CXCL14, CXCL16, CXCL17, CX3CL1, XCL1, and XCL2. In one embodiment, the chemokine is selected from the group consisting of vMIPII, U83, and vCXC1.

[0020] In one embodiment, the cytokine is selected from the group consisting of interleukins, interferons, prolactins, tumor necrosis factors, and TGF-betas.

[0021] In one embodiment, the cytokine is an interleukin. In one embodiment, the interleukin is selected from the group consisting of IL2, IL3, IL4, IL5, IL6, IL7, IL8, IL9, IL10, IL11, IL12A, IL12B, IL13, IL15, IL16, IL17A, IL17B, IL17C, IL17F, IL18, IL19, IL20, IL21, IL22, IL24, IL25, IL26, IL27, IL28A, IL28B, IL29, IL31, IL32, IL33, IL34, IL36A, IL36B, IL36G, IL36RA, IL37, IL38, IL1A, IL1B, and IL1RN.

[0022] In one embodiment, the cytokine is an interferon. In one embodiment, the interferon is selected from the group consisting of IFNA, IFNA1, IFNA2, IFNA4, IFNA5, IFNA6, IFNA7, IFNA8, IFNA10, IFNA14, IFNA16, IFNA17, IFNA21, IFNB, and IFNG.

[0023] In one embodiment, the cytokine is a prolactin. In one embodiment, the prolactin is selected from the group consisting of EPO, GH1, GH2, PRL, CSF3, LEP, and CSF1.

[0024] In one embodiment, the cytokine is a tumor necrosis factor. In one embodiment, the prolactin is selected from the group consisting of TNFA, TNFB, TRAIL, TL1, BAFF, APRIL, RANKL, CD40LG, EDA, FASLG, and CD70.

[0025] In one embodiment, the cytokine is a TGF-beta. In one embodiment, the TGF-beta is selected from the group consisting of TGFB1, TGFB2, TGFB3, GDF15, GDF2, BMP10, INHA, and BMP3.

[0026] In one embodiment, the first binding domain comprises a growth factor. In one embodiment, the growth factor is selected from the group consisting of FGF1, FGF2, FGF3, FGF4, FGF5, FGF19, FGF21, FGF23, KGF, VEGF, PDGFA, PDGFB, NGF, NTF3, NTF4, BDNF, IGF1, and IGF2.

[0027] In some embodiments, the target protein comprises a soluble target protein and a membrane-associated target protein. In some embodiments, the target protein is a membrane-associated target protein, and wherein the second binding domain binds to an extracellular epitope of a membrane-associated target protein. In some embodiments, the target cell comprises a neoplastic cell. In some exemplary embodiments, the target cell is a cancer cell selected from the group consisting of breast cancer, B cell lymphoma, pancreatic cancer, Hodgkin's lymphoma, ovarian cancer, prostate cancer, mesothelioma, lung cancer, non-Hodgkin's B-cell (B-NHL), melanoma, chronic lymphocytic leukemia, acute lymphocytic leukemia, neuroblastoma, glioma, glioblastoma, bladder cancer, and colorectal cancer. In other embodiments, the target cell comprises an immune cell.

[0028] In some embodiments, the target protein is an immune checkpoint protein. In some embodiments, the target protein comprises a cancer antigen. In certain embodiments, the cancer antigen comprises HER2, EGFR, CDCP1, CD38, IGF-1R, MMP14, and TROP2.

[0029] In some embodiments, the target protein comprises an immunomodulatory protein. In certain embodiments, the immunomodulatory protein comprises PD-L1, PD-1, CTLA-4, B7-H3, B7-H4, LAG3, NKG2D, TIM-3, VISTA, CD39, CD73 (NT5E), A2AR, SIGLEC7, and SIGLEC15. In some embodiments, the target protein comprises a B cell antigen. In some exemplary embodiments, the B cell antigen comprises CD19 and CD20.

[0030] In some embodiments, the target protein comprises a soluble target protein. In some embodiments, the soluble target protein comprises an inflammatory cytokine, a growth factor (GF), a toxic enzyme, a target associated with metabolic diseases, a neuronal aggregate, or an autoantibody. In certain embodiments, the inflammatory cytokine comprises lymphotoxin, interleukin-1 (IL-1), IL-2, IL-5, IL-6, IL-12, IL-13, IL-17, IL-18, IL-23, tumor necrosis factor alpha (TNF-α), interferon gamma (IFNγ), and granulocyte-macrophage colony stimulating factor (GM-CSF). In certain embodiments, the growth factor comprises EGF, FGF, NGF, PDGF, VEGF, IGF, GMCSF, GCSF, TGF, RANK-L, erythropieitn, TPO, BMP, HGF, GDF, neurotrophins, MSF, SGF, GDF, and an isoform thereof. In certain embodiments, the toxic enzyme comprises a protein arginine deiminase 1 (PAD1), PAD2, PAD3, PAD4, and PAD6, leucocidin, hemolysin, coagulase, treptokinase, hyaluronidase. In certain embodiments, the toxic enzyme comprises PAD2 or PAD4. In some embodiments, the neuronal aggregate comprises A3, TTR, α-synuclein, TAO, and prion. In certain embodiments, the autoantibody comprises IgA, IgE, IgG, IgM and IgD.

[0031] In some embodiments, the first binding domain and the second binding domain are each independently selected from the group consisting of natural ligands or a fragment, derivative, or small molecule mimetic thereof, IgG, half antibodies, single-domain antibodies, nanobodies, Fabs, monospecific Fab2, Fc, scFv, minibodies, IgNAR, V-NAR, hcIgG, VHH domain, camelid antibodies, and peptibodies.

[0032] In some embodiments, the first binding domain and the second binding domain together form a bispecific antibody, a bispecific diabody, a bispecific Fab2, a bispecific camelid antibody, or a bispecific peptibody scFv-Fc, a bispecific IgG, a knob and hole bispecific IgG, a Fc-Fab, and a knob and hole bispecific Fc-Fab, a cytokine-IgG fusion, a cytokine-Fab fusion, and a cytokine-Fc-scFv fusion. In some embodiments, the first binding domain comprises an Fc-fusion, and the second binding domain comprises an Fc-Fab.

[0033] In some embodiments, the bispecific binding agent provided herein comprises one or more sequences selected from Table 1.

[0034] Also provided herein incudes a nucleic acid that encodes the bispecific binding agent of the present disclosure. In some embodiments, the nucleic acid is operably connected to a promoter.

[0035] Further provided herein incudes an engineered cell capable of protein expression comprising the nucleic acid of the present disclosure. In some embodiments, the engineered cell comprises a B cell, a B memory cell, or a plasma cell.

[0036] Another aspect of the present disclosure relates to a method for making a bispecific binding agent provided herein. In some embodiments, the method comprises: i) providing a cell capable of protein synthesis, comprising the nucleic acid disclosed herein and ii) inducing expression of the bispecific binding agent.

[0037] The present disclosure further provides a vector which comprises the nucleic acid described herein. In some embodiments, the vector further comprises a promoter, wherein the promoter is operably linked to the nucleic acid.

[0038] Another aspect of the present disclosure provides an immunoconjugate comprising: i) a bispecific binding agent of any one of the preceding claims, ii) a small molecule, and iii) a linker.

[0039] The present disclosure also provides a pharmaceutical composition. In some embodiments, the pharmaceutical composition comprises the bispecific binding agent, the nucleic acid, the vector, the engineered cell, or the immunoconjugate described herein, and a pharmaceutically acceptable excipient.

[0040] In another aspect, the present disclosure provides a method of treating a disorder in a subject. In some embodiments, the method comprising administering to a subject in need thereof, a therapeutically effective amount of the bispecific binding agent, the nucleic acid, the vector, the engineered cell, the immunoconjugate, or the pharmaceutical composition provided herein.

[0041] In some embodiments, the disorder comprises a neoplastic disorder, an inflammatory disease, a metabolic disorder, an endocrine disorder, and a neurological disorder. In certain embodiments, the neoplastic disorder comprises breast cancer, B cell lymphoma, pancreatic cancer, Hodgkin's lymphoma, ovarian cancer, prostate cancer, mesothelioma, lung cancer, non-Hodgkin's B-cell (B-NHL), melanoma, chronic lymphocytic leukemia, acute lymphocytic leukemia, neuroblastoma, glioma, glioblastoma, bladder cancer, and colorectal cancer. In certain embodiments, the inflammatory disease comprises inflammatory intestinal disease, rheumatoid arthritis, lupus, Crohn's disease, and ulcerative colitis. In certain embodiments, the metabolic disorder comprises diabetes, Gaucher disease, Hunter syndrome, Krabbe disease, maple syrup urine disease, metachromatic leukodystrophy, mitochondrial encephalopathy, lactic acidosis, stroke-like episodes (MELAS), Niemann-Pick, phenylketonuria (PKU), porphyria, Tay-Sachs disease, and Wilson's disease. In certain embodiments, the neurological disorder comprises Parkinson's disease, Alzheimer's disease, and multiple sclerosis.

### BRIEF DESCRIPTION OF THE DRAWINGS

[0042] FIGS. 1A-1B: 1A) CXCL12-mediated receptor internalization could be used for targeted degradation. A) Schematic of CXCL12 signaling via CXCR4 and CXCR7. 1B) Schematic of KineTAC concept, in which a bispecific binding agent could simultaneously bind CXCR4/CXCR7 and a protein of interest, causing the lysosomal degradation of the target protein.

[0043] FIGS. 2A-2F: KineTACs target cell surface protein PD-L1 for degradation. 2A) Schematic of CXCL12-Tecentriq KineTAC construct. 2B) Multipoint BLI measurement of CXCL12-Tec shows high affinity to PD-L1 Fc fusion. 2C) Flow cytometry showing CXCL12-Isotype binding on MDA-MB-231 cells endogenously expressing CXCR4 and CXCR7. 2D) Dose escalation experiment showing PD-L1 degradation in MDA-MB-231 cells after 24 hr treatment with CXCL12-Tec. 2E) PD-L1 levels after 24 hr treatment of MDA-MB-231 cells with 100 nM of Tecentriq controls and CXCL12-Tec. 2F) PD-L1 levels after 24 hr treatment with MDA-MB-231 cells with 100 nM CXCL12-Tec or 100 nM CXCL12-Isotype+100 nM Tecentriq Fab. Data are representative of at least two independent biological replicates. Densitometry was used to calculate protein levels and normalized to PBS control.

[0044] FIGS. 3A-3F: KineTAC platform is generalizable to targeting other therapeutically relevant cell surface proteins. Dose escalation showing HER2 degradation in 3A) MCF-7, 3B) MDA-MB-175VII, or 3C) SK-BR-3 cells after 24 hr treatment with CXCL12-Tras or 100 nM Trastuzumab Fab. 3D) Summary of HER2 degradation in MCF-7, MDA-MB-175VII, and SK-BR-3 cell lines. Error bars represent the standard deviation of two biological replicates. 3E) Dose escalation showing EGFR degradation in HeLa cells after 24 hr treatment with CXCL12-Ctx or 100 nM Ctx-Isotype. 3F) Dose escalation showing CDCP1 degradation in HeLa cells after 24 hr treatment with CXCL12-4A06 or 100 nM 4A06 Fab. Data are representative of at least two independent biological replicates. Densitometry was used to calculate protein levels and normalized to PBS control.

[0045] FIGS. 4A-4D: CXCL12-Tec causes degradation of PD-L1 in MDA-MB-231 in a lysosomal- and time-dependent manner. 4A) 1 hr pre-treatment of MDA-MB-231 cells with either 100 nM bafilomycin or 5 μM MG-132 followed by 24 hr treatment with 100 nM CXCL12-Tec indicates that CXCL12-Tec degrades PD-L1 in a lysosome-dependent manner. 4B) Time course experiment showing degradation of PD-L1 at various time points after treatment with 100 nM CXCL12-Tec. 4C) Data from time course experiment plotting levels of PD-L1 relative to control versus time (hr). Error bars represent the standard deviation of three biological replicates. 4D) Levels of cell surface and whole cell PD-L1 after 24 hr treatment of MDA-MB-231 cells with 100 nM CXCL12-Tec or Tecentriq Fab shows marginal differences between cell surface and whole cell PD-L1 levels. Data are representative of at least two independent biological replicates.

[0046] FIGS. 5A-5C: KineTAC-mediated degradation is not only dependent on CXCR4 internalization. 5A) Schematic of proposed mechanisms of KineTAC-mediated degradation of target proteins. 5B) siRNA knockdown of CXCR4 in HeLa cells after 48 hr transfection is dependent on CXCR4-targeting siRNA pool. C) EGFR levels are unchanged after siRNA knockdown of CXCR4 for 48 hrs followed by 24 hr treatment with 100 nM CXCL12-Ctx in HeLa cells. Data are representative of at least two independent biological replicates. Densitometry was used to calculate protein levels and normalized to PBS control.

[0047] FIGS. 6A-6D: KineTACs do not induce major cellular perturbations. Fold change in the abundance of 6A) surface enriched or 6B) whole cell MDA-MB-231 proteins detected using quantitative proteomics analysis after 48 hr treatment with 100 nM CXCL12-Tec. Data are the mean of two biological replicates and two technical replicates. 6C) Washout experiment showing that PD-L1 levels do not recover up to 48 hr post-treatment with 100 nM CXCL12-Tee in MDA-MB-231 cells. 6D) Washout experiment showing that EGFR levels recover at 24 hr post-treatment with 100 nM CXCL12-Ctx in HeLa cells. Data are representative of at least two independent biological replicates. Densitometry was used to calculate protein levels and normalized to PBS control.

[0048] FIGS. 7A-7E: Requirements for efficient KineTAC-mediated degradation of PD-L1. 7A) PD-L1 levels after treatment with agonistic and antagonistic 100 nM CXCL12-Tec variants for 24 hr in MDA-MB-231 cells. 7B) PD-L1 levels after treatment with 100 nM CXCL12-Tec wild-type or alanine mutants for 24 hr in MDA-MB-231 cells. 7C) Correlation of PD-L1 levels as calculated by densitometry and either K_{D}, Kₒₙ, or K_{off}. Wild-type Tecentriq is indicated in red. Error bars represent the standard deviation of three biological replicates. 7D) PD-L1 levels after treatment with 100 nM CXCL12-Tec or pH-sensitive binder CXCL12-BMS936559 for 24 hr in MDA-MB-231 cells. 7E) PD-L1 levels after treatment with 100 nM aglycosylated or glycosylated CXCL12-Tec for 24 hr in MDA-MB-231 cells. Data are representative of at least two independent biological replicates. Densitometry was used to calculate protein levels and normalized to PBS control.

[0049] FIGS. 8A-8B: KineTAC diabody construct does not induce significant degradation of PD-L1 as compared to bispecific. 8A) Multipoint BLI measurement of CXCL12-Tec diabody shows high affinity to PD-L1 Fc fusion. 8B) PD-L1 levels after treatment with 100 nM CXCL12-Tec bispecific or diabody for 24 hr in MDA-MB-231 cells shows that the bispecific construct is superior in degrading PD-L1. Data are representative of at least two independent biological replicates. Densitometry was used to calculate protein levels and normalized to PBS control.

[0050] FIGS. 9A-9B: HER2-targeting KineTAC reduces in vitro cell viability of breast cancer cell lines. In vitro potency of CXCL12-Tras in two HER2-positive breast cancer cell lines, 9A) MDA-MB-175VII and 9B) SK-BR-3, as compared to Trastuzumab Fab or IgG. Three biological data points are shown.

[0051] FIGS. 10A-10C: KineTACs target cell surface protein PD-L1 for degradation. FIG. 10A is flow cytometry showing degradation of surface PD-L1 on MDA-MB-231 cells after 24 hr treatment with 100 nM CXCL12-Atz, but not after addition of controls. FIG. 10B shows levels of cell surface and whole cell PD-L1 after 24 hr treatment of MDA-MB-231 cells with 100 nM CXCL12-Atz or atezolizumab Fab shows marginal differences between cell surface and whole cell PD-L1 levels. FIG. 10C is a representative western blot showing PD-L1 levels after 24 hr treatment of MDA-MB-231 cells with high concentrations (50-500 nM) of CXCL12-Atz shows that no “hook effect” is observed in this concentration range. Data are representative of at least three independent biological replicates. Densitometry was used to calculate protein levels and normalized to PBS control.

[0052] FIG. 11: Correlation of HER2 levels to CXCR7/HER2 transcript level ratio as calculated by densitometry after treatment with 100 nM CXCL12-Tras for 24 hrs in MCF7, MDA-MB-175VII, and SK-BR-3 cells. Error bars represent the standard deviation of at least two biological replicates.

[0053] FIGS. 12A-12F: FIG. 12A shows a summary of EGFR degradation in various EGFR-expressing cell lines following 24 hr treatment with CXCL12-Ctx. FIG. 12B shows dose escalation showing EGFR degradation in FIG. 12B, MDA-MB-231, FIG. 12C, A431, and FIG. 12D, NCI-H292 cells following treatment with CXCL12-Ctx or 100 nM Cetuximab isotype. FIG. 12E shows EGFR levels after treatment with 100 nM CXCL12-Ctx or Ctx isotype control for 24 hrs in non-small cell lung cancer cell lines A549, NCI-H358, and HCC827. FIG. 12F shows correlation of EGFR levels to CXCR7/EGFR transcript level ratio as calculated by densitometry after treatment with 100 nM CXCL12-Ctx for 24 hrs in HeLa, A431, NCI-H292, MDA-MB-231, A549, NCI-H358, and HCC827 cells. Error bars represent the standard deviation of at least two biological replicates.

[0054] FIG. 13: Dose escalation showing TROP2 degradation in MCF7 cells following treatment with CXCL12-Sacituzumab or sacituzumab isotype. Data are representative of at least two independent biological replicates. Densitometry was used to calculate protein levels and normalized to PBS control. P-values were determined by unpaired two-tailed t-tests.

[0055] FIGS. 14A-14C: KineTACs mediate degradation of PD-1 on primary human CD8+ T cells. Representative flow cytometry showing presence of CD8+ T cell activation markers, FIG. 14A, PD-1 or FIG. 14B, CD25, following 4 day incubation with activation cocktail (IL-2, IL-15, anti-CD3, anti-CD28). FIG. 14C shows representative flow demonstrating cell surface PD-1 degradation on activated primary human CD8+ T cells following 24 hr treatment with 100 nM CXCL12-Nivo or nivolumab isotype.

[0056] FIGS. 15A-15F: FIG. 15A shows PD-L1 in MDA-MB-231 or EGFR in HeLa cells are degraded after 24 hr treatment with 100 nM CXCL11-Atz or CXCL11-Ctx, respectively, at levels similar to CXCL12 KineTACs. CXCL11 and vMIPII are alternative CXCR7-targeting KineTACs that degrade PD-L1 and EGFR. FIG. 15B shows a representative western blot showing PD-L1 degradation in MDA-MB-231 cells following 24 hr treatment with various doses of CXCL11-Atz or 100 nM atezolizumab Fab. FIG. 15C shows a comparison of dose response of PD-L1 degradation in MDA-MB-231 cells following 24 hr treatment with CXCL11- or CXCL12-Atz. FIG. 15D shows a representative western blot showing EGFR degradation in HeLa cells following 24 hr treatment with various doses of CXCL11-Ctx or 100 nM cetuximab isotype. FIG. 15E shows a comparison of dose response of EGFR degradation in HeLa cells following 24 hr treatment with CXCL11- or CXCL12-Ctx. FIG. 15F shows PD-L1 in MDA-MB-231 cells is degraded after 24 hr treatment with 100 nM vMIPII-Atz at levels similar to CXCL12-Atz. Data are representative of at least three independent biological replicates. P-values were determined by unpaired two-tailed t-tests. Densitometry was used to calculate protein levels and normalized to PBS control.

[0057] FIGS. 16A-16B: KineTACs mediate target degradation in a highly selective, lysosomal-, time-, and CXCR7-dependent manner. Fold change in abundance of FIG. 16A, surface enriched or FIG. 16B, whole cell HeLa proteins detected using quantitative proteomics analysis after 48 hr treatment with 100 nM CXCL12-Ctx reveals highly selective EGFR degradation. Data are the mean of two biological replicates and two technical replicates. Proteins showing a >2-fold change from PBS control with a significance of P<0.01 were considered significantly changed.

[0058] FIGS. 17A-17B: KineTACs are highly selective and functionally active in vitro. FIG. 17A shows a comparison between KineTAC and LYTAC whole cell quantitative proteomics experiments in HeLa cells shows large overlap in total proteins identified. FIG. 17B shows 23 of 25 proteins that were significantly up- or down-regulated in the LYTAC dataset were identified in the KineTAC whole cell dataset.

[0059] FIG. 18: Quantification of CXCL12-Tras plasma levels in male nude mice injected intravenously at 5, 10, or 15 mg/kg. The data show values of three different mice. Densitometry was used to calculate protein levels and normalized to whole protein levels. P-values were determined by unpaired two-tailed t-tests.

[0060] FIGS. 19A-19F: CXCL12-Atz is cross-reactive to mouse cell lines and stable in vivo. Flow cytometry showing that human CXCL12 is cross reactive and binds to the surface of FIG. 19B, MC38 and FIG. 19C, CT26 mouse cell lines. FIG. 19D shows a dose escalation showing mouse PD-L1 degradation in MC38 and CT26 cells following 24 hr treatment with CXCL12-Atz. Representative western blot of dose escalation showing mouse PD-L1 degradation in FIG. 19E, MC38 or FIG. 19F, CT26 mouse cells following 24 hr treatment with CXCL12-Atz and mouse IFNg. FIG. 19A shows a representative western blot showing plasma levels of CXCL12-Tras in male nude mice injected intravenously with 5, 10, or 15 mg/kg. Data are representative of three independent biological replicates or mice. Densitometry was used to calculate protein levels and normalized to PBS control.

[0061] FIGS. 20A-20H: KineTACs enable intracellular uptake of soluble extracellular proteins. FIG. 20 is a schematic of KineTAC concept for targeting extracellular proteins for lysosomal degradation. FIG. 20B shows representative flow cytometry showing shift in median fluorescence intensity in HeLa cells treated for 24 hr with 50 nM CXCL12-Beva and 25 nM VEGF-647 compared to VEGF alone. FIG. 20C is a summary of flow cytometry demonstrating shift in median fluorescence intensity in HeLa cells following 24 hr treatment with 50 nM CXCL12-Beva or isotype controls and 25 nM VEGF-647 compared to VEGF alone. FIG. 20D shows a comparison of HeLa cells lifted with versene (normal lift) or 0.25% trypsin-EDTA (trypsin lift) following 24 hr treatment with 50 nM CXCL12-Beva or isotype controls and 25 nM VEGF-647. No significant change in median fluorescence intensity suggests that fluorescence shift represents accumulation of intracellular VEGF-647. FIG. 20E is a summary of flow cytometry demonstrating decrease in median fluorescence intensity in HeLa cells following pre-treatment with 100 nM bafilomycin and 24 hr treatment with 50 nM CXCL12-Beva and 25 nM VEGF-647, as compared to no pretreatment with bafilomycin. FIG. 20F is a time course experiment showing increase in VEGF-647 uptake overtime in HeLa cells treated with 50 nM CXCL12-Beva and 25 nM VEGF-647. FIG. 20G shows HeLa cells treated for 24 hr with varying ratios of CXCL12-Beva to VEGF, at constant 25 nM VEGF-647, demonstrate that increasing the KineTAC:VEGF ratio increases VEGF uptake. FIG. 20H shows a panel of cell lines for VEGF-647 uptake experiments, demonstrating increased VEGF-647 uptake for CXCL12-Beva treated cells compared to bevacizumab isotype or VEGF alone. Median fluorescence intensity (MFI) was measured using live cell flow cytometry. Data are representative of at least three independent biological replicates and error bars show standard deviation between replicates. P-values were determined by unpaired two-tailed t-tests. Fold changes are reported relative to incubation with soluble ligand alone.

[0062] FIGS. 21A-21C: KineTACs mediate uptake of extracellular VEGF. FIG. 21A shows representative flow cytometry showing levels of VEGF-647 cell surface labeling after incubation with HeLa cells for 1 hr at 4° C. and normal versene lift. FIG. 21B shows representative flow cytometry showing reduction of VEGF-647 cell surface labeling after incubation with HeLa cells for 1 hr at 4° C. and lift with 0.25% trypsin-EDTA (trypsin lift). FIG. 21C shows correlation of VEGF uptake as calculated by flow cytometry to CXCR7 transcript levels. Error bars represent the standard deviation of three biological replicates. Linear regression analysis using GraphPad Prism was used to calculate the coefficient of determination (R²) to determine correlation. Data are representative of two biological replicates.

[0063] FIGS. 22A-22C: KineTACs mediate the uptake of extracellular TNFa. FIG. 22A shows representative flow cytometry showing shift in median fluorescence intensity in HeLa cells treated for 24 hr with 50 nM CXCL12-Ada and 25 nM TNFa-647 compared to TNFa alone. FIG. 22B shows a summary of flow cytometry demonstrating shift in median fluorescence intensity in HeLa cells following 24 hr treatment with 50 nM CXCL12-Ada or adalimumab isotype, and 25 nM TNFa-647 compared to TNFa alone. FIG. 22C shows HeLa cells treated for 24 hr with varying ratios of CXCL12-Ada to TNFa, at constant 25 nM TNFa-647, demonstrate that increasing the KineTAC:TNFa ratio increases TNFa uptake. P-values were determined by unpaired two-tailed t-tests. Fold changes are reported relative to incubation with soluble ligand alone.

[0064] FIGS. 23A-23B: IL2-bearing KineTACs can co-opt CD25 to degrade cell surface PD-1. FIG. 23A show a schematic of the KineTAC concept for targeting cell surface proteins for lysosomal degradation via IL2-mediated endocytosis. FIG. 23B shows a summary of flow cytometry data demonstrating degradation of cell surface PD-1 on activated primary human CD8+ T cells. Data are representative of at least three independent biological replicates. Data are representative of at least three biological replicates. P-values were determined by unpaired two-tailed t-tests.

[0065] FIGS. 24A-24B: Requirements for efficient KineTAC-mediated degradation of PD-L1. FIG. 24A shows PD-L1 levels after treatment with CXCL12-Atz wild-type or CXCL12 N-terminal variants (100 nM) for 24 hr in MDA-MB-231 cells. FIG. 24B shows correlation of PD-L1 levels to CXCR7 IC50 (nM) of CXCL12 variants as calculated by densitometry after treatment with 100 nM CXCL12-Atz variants for 24 hrs in MDA-MB-231 cells. Wild-type CXCL12 is indicated in red. Error bars represent the standard deviation of three biological replicates.

[0066] FIGS. 25A-25B: FIG. 25A shows HER2 levels after treatment with 100 nM CXCL12-Tras or CXCL12-Ptz in MCF7 cells demonstrate that different epitope binders affect degradation of HER2. FIG. 25B shows EGFR levels after treatment with 100 nM of CXCL12-Ctx, Depa, Nimo, Matu, Neci, or Pani in HeLa cells demonstrate that there is dependence on EGFR binding epitope for degradation efficiency. Data are representative of at least three independent biological replicates. Densitometry was used to calculate protein levels and normalized to PBS control. P-values were determined by unpaired two-tailed t-tests. Linear regression analysis using GraphPad Prism was used to calculate the coefficient of determination (R²) to determine correlation.

[0067] FIGS. 26A-26B: FIG. 26D shows a schematic of EGFR extracellular domains (I-IV) with locations of anti-EGFR antibody epitopes (left) and crystal structure of domain III (PDB: 5SX4) with the epitopes of anti-EGFR binders highlighted in their respective colors. FIG. 26B shows correlation of EGFR levels to K_{D} as calculated by densitometry after treatment with 100 nM CXCL12-Depa, Nimo, Pani, Neci, Matu, or Ctx for 24 hrs in HeLa cells. Error bars represent the standard deviation of three biological replicates.

[0068] FIGS. 27A-27B: FIG. 27A is a schematic of CXCL12-Atz IgG fusion construct where CXCL12 chemokine is fused to the N-terminus of the heavy chain (HC) or light chain (LC) of atezolizumab IgG via an Avi tag linker. FIG. 27B shows PD-L1 levels after treatment with 100 nM CXCL12-Atz bispecific or IgG fusion for 24 hr in MDA-MB-231 cells shows that the bispecific construct is superior in degrading PD-L1. Data are representative of at least two independent biological replicates. Densitometry was used to calculate protein levels and normalized to PBS control.

[0069] FIGS. 28A-28C: KineTACs are highly selective and functionally active in vitro. FIG. 28A shows in vitro potency of CXCL12-Tras in HER2-expressing breast cancer cell line MDA-MB-175VII demonstrates superior cell killing compared to CXCL12 isotype, which is functionally inactive. FIG. 28B shows in vitro potency of CXCL12-Tras in MDA-MB-175VII cells demonstrates superior cell killing compared to trastuzumab Fab alone. FIG. 28E shows in vitro potency of CXCL12-Ctx in EGFR-expressing non-small cell lung cancer cell line NCI-H358 demonstrates superior cell killing compared to cetuximab IgG. Data are representative of at least two biological replicates. P-values were determined by unpaired two-tailed t-tests.

[0070] FIG. 29: Other chemokines, cytokines, and growth factors are useful KineTACs. Fold change in median fluorescence intensity in THP-1 cells after 50 nM VEGF-647 and 25 nM KineTAC treatment is shown indicating likely uptake of VEGF triggered by KineTACs consisting of bevacizumab hole Fc and the indicated cytokine knob Fc.

[0071] FIG. 30: Further evidence that other chemokines, cytokines, and growth factors are useful KineTACs. Fold change in median fluorescence intensity in THP-1 cells after 50 nM VEGF-pHrodoRed and 25 nM KineTAC treatment is shown indicating likely uptake of VEGF triggered by KineTACs consisting of bevacizumab hole Fc and the indicated cytokine knob Fc. Error bars represent standard deviation of 2 biological replicates.

[0072] FIG. 31: Confocal microscopy images of HeLa cells treated for 24 hr with 100 nM CXCL12-Ctx shows near complete removal of EGFR from the cell surface.

### DETAILED DESCRIPTION

[0073] The present disclosure provides, among others, fully recombinant bispecific binding agents comprising a first binding domain and a second binding domain for targeted degradation of a target protein, whether soluble or membrane-associated. As used herein, the targeted degradation can be mediated by the lysosome pathway. The first binding domain can specifically bind to at least one endogenous cell surface receptor. In some embodiments, the binding of the first binding domain to the at least one endogenous cell surface receptor results in the internalization of the endogenous cell surface receptor and the bispecific binding agent. In certain embodiments, the endogenous cell surface receptor is membrane associated. Further, the second binding domain can specifically bind to a target protein. The bispecific binding agents of the present disclosure are useful as a targeted degradation platform. The first and second binding domains can be altered and combined for specific purposes.

[0074] Targeted protein degradation has emerged over the past two decades as a potential rival to traditional therapeutic modalities for a variety of human diseases. Traditional inhibitors, such as small molecules and biologics, operate through occupancy-driven pharmacology. This paradigm requires high binding potency and frequent dosing to maintain a prolonged therapeutic effect. Furthermore, non-enzymatic protein functions, such as scaffolding functions of kinases, are difficult to block using inhibitors due to lack of ligandable binding areas. Degrader technologies, on the other hand, operate via event-driven pharmacology, enabling one degrader molecule to catalytically degrade multiple target protein molecules. Small molecule degraders, such as PROteolysis TArgeting Chimeras (PROTACs), are heterobifunctional molecules comprised of a ligand to an E3 ubiquitin ligase chemically linked to a protein of interest ligand. Simultaneous binding to both the E3 ligase and target protein enables the transfer of ubiquitin onto the target protein and its subsequent degradation by the proteasome. Small molecule degraders have demonstrated success in degrading over 60 protein targets, providing greater therapeutic benefit compared to the parent inhibitor, overcoming classical resistance mechanisms, and targeting “undruggable” proteins. Furthermore, two PROTACs are currently being tried in phase I clinical trials to test their efficacy and safety as therapeutic agents.

[0075] Due to their intracellular mechanism of action, small molecule PROTACs are limited to targeting proteins with cytosolic domains with ligandable surfaces. As such, very few examples exist for PROTACs degrading membrane proteins. Given the vast number of cell surface and extracellular disease-related proteins, there is a critical need to develop degraders capable of targeting this portion of the proteome. Two recent platforms have expanded targeted protein degradation to this important class. One in particular, termed antibody-based PROTACs (AbTACs), utilizes bispecific IgGs to hijack cell surface E3 ligase RNF43 to degrade checkpoint inhibitor protein programmed death-ligand 1 (PD-L1) via the lysosome. The second, termed lysosome-targeting chimeras (LYTACs), utilizes IgG-glycan bioconjugates to co-opt lysosome shuttling receptors, such as mannose-6-phosphate receptor (M6PR) and asialoglycoprotein receptor (ASGPR), to degrade both cell surface and soluble extracellular targets. However, LYTAC production requires complex chemical synthesis and in vitro bioconjugation, thereby limiting the modularity of this platform.

[0076] Cytokines and growth factors are each a diverse class of soluble extracellular proteins. Upon binding to their cognate receptors on the surface of cells, cytokines and growth factors trigger downstream signaling, leading to internalization of the cytokine-receptor complex. The present disclosure demonstrates that cytokine-mediated and growth factor-mediated internalization could be co-opted for targeted degradation applications. For instance, chemokine CXCL12 is known to specifically bind to two chemokine receptors, CXCR4 and CXCR7, and subsequently internalize via two distinct mechanisms (FIG. 1A). Binding to CXCR4 agonizes the receptor, leading to its internalization and shuttling to the lysosome for degradation. CXCR7, however, is constitutively internalized and recycled back to the cell surface, independent of ligand binding. Therefore, binding to CXCR7 causes the internalization of CXCL12 without subsequent degradation of CXCR7 or downstream signaling. In some non-limiting exemplary embodiments, the present disclosure demonstrates the development of a new targeted degradation platform technology, termed cytokine receptor targeting chimeras (KineTACs), which comprise of fully recombinant bispecific binding agents that utilize CXCL12-mediated internalization of its cognate receptors to target various therapeutically relevant cell surface proteins for lysosomal degradation (FIG. 1B).

[0077] Among others, the present disclosure demonstrates that these fully recombinant bispecific binding agents (e.g., the KineTACs) can efficiently degrade the target proteins, and that the degradation is dependent on the bispecific KineTAC scaffold and occurs in a dose-dependent manner. Further, the target degradation mediated by the bispecific binding agents of the present disclosure does not induce unwanted, off-target proteome-wide changes. Further, the present disclosure demonstrates that the levels of degradation of the target protein are dependent on the binding affinity of the antibody arm to the target protein. Additionally, the present disclosure shows that the stability and pharmacokinetic properties of KineTACs can be improved, e.g., by glycosylation, for in vivo use without major disruption to degradation efficiency. The present disclosure also shows that some bispecific IgGs can be more effective than a diabody construct. Furthermore, the present disclosure demonstrates that KineTAC-mediated degradation can cause functional consequences in reducing cancer cell viability in vitro, and that significant degradation of the HER2 is not needed to induce major reductions in cell viability. The present disclosure further demonstrates that the bispecific binding agents provided herein (e.g., the KineTACs) are generalizable to multiple targets in multiple cell types, and therefore could be expanded to targeting various protein targets for degradation.

### Definition

[0078] The singular form “a”, “an”, and “the” include plural references unless the context clearly dictates otherwise. For example, the term “a cell” includes one or more cells, including mixtures thereof “A and/or B” is used herein to include all of the following alternatives: “A”, “B”, “A or B”, and “A and B.”

[0079] The terms “administration” and “administering”, as used interchangeably herein, refer to the delivery of a composition or formulation by an administration route including, but not limited to, intravenous, intra-arterial, intracerebral, intrathecal, intramuscular, intraperitoneal, subcutaneous, intramuscular, and combinations thereof. The term includes, but is not limited to, administration by a medical professional and self-administration.

[0080] The terms “host cell” and “recombinant cell” are used interchangeably herein. It is understood that such terms, as well as “cell culture”, “cell line”, refer not only to the particular subject cell or cell line but also to the progeny or potential progeny of such a cell or cell line, without regard to the number of transfers. It should be understood that not all progeny are exactly identical to the parental cell. This is because certain modifications may occur in succeeding generations due to either mutation (e.g., deliberate or inadvertent mutations) or environmental influences, such progeny may not, in fact, be identical to the parent cell, but are still included within the scope of the term as used herein, so long as the progeny retain the same functionality as that of the original cell or cell line.

[0081] The term “operably linked”, as used herein, denotes a physical or functional linkage between two or more elements, e.g., polypeptide sequences or polynucleotide sequences, which permits them to operate in their intended fashion.

[0082] The term “heterologous”, refers to nucleic acid sequences or amino acid sequences operably linked or otherwise joined to one another in a nucleic acid construct or chimeric polypeptide that are not operably linked or are not contiguous to each other in nature.

[0083] The term “percent identity,” as used herein in the context of two or more nucleic acids or proteins, refers to two or more sequences or subsequences that are the same or have a specified percentage of nucleotides or amino acids that are the same (e.g., about 60% sequence identity, 65%, 70%, 75%, 80%, 85%, 90%, 91%, 92%, 93%, 94%, 95%, 96%, 97%, 98%, 99%, or higher identity over a specified region, when compared and aligned for maximum correspondence over a comparison window or designated region) as measured using a BLAST or BLAST 2.0 sequence comparison algorithms with default parameters described below, or by manual alignment and visual inspection. See, e.g., the NCBI web site at ncbi.nlm.nih.gov/BLAST. This definition also refers to, or may be applied to, the complement of a test sequence. This definition also includes sequences that have deletions and/or additions, as well as those that have substitutions. Sequence identity typically is calculated over a region that is at least about 20 amino acids or nucleotides in length, or over a region that is 10-100 amino acids or nucleotides in length, or over the entire length of a given sequence. Sequence identity can be calculated using published techniques and widely available computer programs, such as the GCS program package (Devereux et al, Nucleic Acids Res (1984) 12:387), BLASTP, BLASTN, FASTA (Atschul et al., J Mol Biol (1990) 215:403). Sequence identity can be measured using sequence analysis software such as the Sequence Analysis Software Package of the Genetics Computer Group at the University of Wisconsin Biotechnology Center (1710 University Avenue, Madison, Wis. 53705), with the default parameters thereof

[0084] The term “treatment” used in reference to a disease or condition means that at least an amelioration of the symptoms associated with the condition afflicting an individual is achieved, where amelioration is used in a broad sense to refer to at least a reduction in the magnitude of a parameter, e.g., a symptom, associated with the condition being treated. Treatment also includes situations where the pathological condition, or at least symptoms associated therewith, are completely inhibited, e.g., prevented from happening, or eliminated entirely such that the host no longer suffers from the condition, or at least the symptoms that characterize the condition. Thus, treatment includes: (i) prevention (i.e., reducing the risk of development of clinical symptoms, including causing the clinical symptoms not to develop, e.g., preventing disease progression), and (ii) inhibition (i.e., arresting the development or further development of clinical symptoms, e.g., mitigating or completely inhibiting an active disease).

[0085] As used herein, and unless otherwise specified, a “therapeutically effective amount” of an agent is an amount sufficient to provide a therapeutic benefit in the treatment or management of the cancer, or to delay or minimize one or more symptoms associated with the cancer. A therapeutically effective amount of a compound means an amount of therapeutic agent, alone or in combination with other therapeutic agents, which provides a therapeutic benefit in the treatment or management of the cancer. The term “therapeutically effective amount” can encompass an amount that improves overall therapy, reduces or avoids symptoms or causes of the cancer, or enhances the therapeutic efficacy of another therapeutic agent. An example of an “effective amount” is an amount sufficient to contribute to the treatment, prevention, or reduction of a symptom or symptoms of a disease, which could also be referred to as a “therapeutically effective amount.” A “reduction” of a symptom means decreasing of the severity or frequency of the symptom(s), or elimination of the symptom(s). The exact amount of a composition including a “therapeutically effective amount” will depend on the purpose of the treatment, and will be ascertainable by one skilled in the art using known techniques (see, e.g., Lieberman, Pharmaceutical Dosage Forms (vols. 1-3, 2010); Lloyd, The Art, Science and Technology of Pharmaceutical Compounding (2016); Pickar, Dosage Calculations (2012); and Remington: The Science and Practice of Pharmacy, 22nd Edition, 2012, Gennaro, Ed., Lippincott, Williams & Wilkins).

[0086] As used herein, a “subject” or an “individual” includes animals, such as human (e.g., human individuals) and non-human animals. In some embodiments, a “subject” or “individual” can be a patient under the care of a physician. Thus, the subject can be a human patient or an individual who has, is at risk of having, or is suspected of having a disease of interest (e.g., cancer) and/or one or more symptoms of the disease. The subject can also be an individual who is diagnosed with a risk of the condition of interest at the time of diagnosis or later. The term “non-human animals” includes all vertebrates, e.g., mammals, e.g., rodents, e.g., mice, and non-mammals, such as non-human primates, sheep, dogs, cows, chickens, amphibians, reptiles, and the like.

[0087] Where a range of values is provided, it is understood that each intervening value, to the tenth of the unit of the lower limit unless the context clearly dictates otherwise, between the upper and lower limit of that range and any other stated or intervening value in that stated range, is encompassed within the disclosure. The upper and lower limits of these smaller ranges may independently be included in the smaller ranges, and are also encompassed within the disclosure, subject to any specifically excluded limit in the stated range. Where the stated range includes one or both of the limits, ranges excluding either or both of those included limits are also included in the disclosure.

[0088] All ranges disclosed herein also encompass any and all possible sub-ranges and combinations of sub-ranges thereof. Any listed range can be recognized as sufficiently describing and enabling the same range being broken down into at least equal halves, thirds, quarters, fifths, tenths, and so forth. As a non-limiting example, each range discussed herein can be readily broken down into a lower third, middle third and upper third, and so forth. As will also be understood by one skilled in the art all language such as “up to,” “at least,” “greater than,” “less than,” and the like include the number recited and refer to ranges which can be subsequently broken down into sub-ranges as discussed above. Finally, as will be understood by one skilled in the art, a range includes each individual member. Thus, for example, a group having 1-3 articles refers to groups having 1, 2, or 3 articles. Similarly, a group having 1-5 articles refers to groups having 1, 2, 3, 4, or 5 articles, and so forth.

[0089] It is appreciated that certain features of the disclosure, which are, for clarity, described in the context of separate embodiments, may also be provided in combination in a single embodiment. Conversely, various features of the disclosure, which are, for brevity, described in the context of a single embodiment, may also be provided separately or in any suitable sub-combination. All combinations of the embodiments pertaining to the disclosure are specifically embraced by the present disclosure and are disclosed herein just as if each and every combination was individually and explicitly disclosed. In addition, all sub-combinations of the various embodiments and elements thereof are also specifically embraced by the present disclosure and are disclosed herein just as if each and every such sub-combination was individually and explicitly disclosed herein.

[0090] Although features of the disclosures may be described in the context of a single embodiment, the features may also be provided separately or in any suitable combination. Conversely, although the disclosures may be described herein in the context of separate embodiments for clarity, the disclosures may also be implemented in a single embodiment. Any published patent applications and any other published references, documents, manuscripts, and scientific literature cited herein are incorporated herein by reference for any purpose. In the case of conflict, the present specification, including definitions, will control. In addition, the materials, methods, and examples are illustrative only and not intended to be limiting.

### Compositions of the Disclosure

[0091] The present disclosure provides, among others, fully recombinant bispecific binding agents comprising a first binding domain and a second binding domain. The first binding domain can specifically bind to at least one endogenous cell surface receptor. In some embodiments, the binding of the first binding domain to the at least one endogenous cell surface receptor results in the internalization of the endogenous cell surface receptor and the bispecific binding agent. In other embodiments, the endogenous cell surface receptor can be internalized on its own, and thus results in the internalization of the target protein, which is described in greater detail below, due to simultaneous binding of bispecific binding agent to the endogenous cell surface receptor and target protein. In certain embodiments, the endogenous cell surface receptor is membrane associated. Further, the second binding domain can specifically bind to a target protein. In some non-limiting exemplary embodiments, the present disclosure demonstrates the development of a new targeted degradation platform technology, termed cytokine receptor targeting chimeras (KineTACs), which includes fully recombinant bispecific binding agents that utilize endogenous cell surface receptor-mediated internalization (e.g., through the binding of CXCL12 and its receptors) to target various therapeutically relevant proteins for lysosomal degradation (FIG. 1B).

[0092] The disclosure also provides, among others, nucleic acids that encode the bispecific binding agents, cells comprising the nucleic acid, immunoconjugates of the bispecific binding agents, and pharmaceutical compositions comprising the bispecific binding agents. The disclosure also provides methods of treatment using bispecific binding agents or immunoconjugates, nucleic acids encoding bispecific binding agents or pharmaceutical compositions comprising the bispecific binding agents, immunoconjugates, and/or nucleic acids encoding the bispecific binding agents. The disclosure also provides compositions and methods useful for producing such agents, nucleic acids encoding same, host cells genetically modified with the nucleic acids, as well as methods for modulating an activity of a cell and/or for the treatment of various diseases such as cancers.

[0093] In the following detailed description, reference is made to the accompanying drawings, which form a part hereof. In the drawings, similar symbols generally identify similar components, unless context dictates otherwise. The illustrative alternatives described in the detailed description, drawings, and claims are not meant to be limiting. Other alternatives may be used and other changes may be made without departing from the spirit or scope of the subject matter presented here. It will be readily understood that the aspects, as generally described herein, and illustrated in the Figures, can be arranged, substituted, combined, and designed in a wide variety of different configurations, all of which are explicitly contemplated and make part of this application.

### Bispecific Binding Agents

[0094] The bispecific binding agents provided herein comprise a first binding domain and a second binding domain. The first binding domain can specifically bind to at least one endogenous cell surface receptor. In some embodiments, the binding of the first binding domain to the at least one endogenous cell surface receptor results in the internalization of the endogenous cell surface receptor and the bispecific binding agent. In other embodiments, the endogenous cell surface receptor can be internalized on its own, and pull in the target protein, which is described in greater detail below, due to simultaneous binding of bispecific binding agent to the endogenous cell surface receptor and target protein. In certain embodiments, the endogenous cell surface receptor is membrane associated. Further, the second binding domain can specifically bind to a target protein.

[0095] The first binding domain of the bispecific binding agents provided herein can be a cytokine (e.g., a chemokine), or an isoform or a derivative capable of binding thereof. A functional derivative of a cytokine can be any agent that possesses the binding activity of a cytokine. For example, in some embodiments, the first binding domain of the bispecific binding agents can be an antagonistic variant of a cytokine which does not have a functional effect but binds to the endogenous cell surface receptors of the cytokine. In this instance, the antagonistic variant of a cytokine is a functional derivative of the cytokine. In other embodiments, the first binding domain of the bispecific binding agents can be a binding agent (e.g., an antibody or a fragment thereof, a peptide, or a small molecule) that binds to the endogenous cell surface receptors of a cytokine.

[0096] A functional derivative of a cytokine can be any agent that maintains binding affinity and/or selectivity of the cytokine to a cytokine receptor. The functional derivative may or may not have the same activity as the native cytokine. For example, a functional derivative of a cytokine may share the binding affinity of the cytokine to the cytokine receptor but the functional derivative may lack the agonistic or antagonistic activity of the cytokine. In certain embodiments, a functional derivative of a cytokine shares the binding affinity of the cytokine to the cytokine receptor and the functional derivative maintains similar agonistic or antagonistic activity relative to the cytokine.

[0097] In some embodiments, the first binding domain is a binding agent, e.g., an antibody or a fragment thereof, a peptide, a small molecule, that binds to the same epitope on a cytokine receptor as a chemokine selected from CCL1, CCL2, CCL3, CCL3L1, CCL4, CC4L1, CCL5, CCL7, CCL8, CCL11, CCL13, CCL14, CCL15, CCL16, CCL17, CCL18, CCL19, CCL20, CCL21, CCL22, CCL23, CCL24, CCL25, CCL26, CCL27, and CCL28. In some embodiments, the first binding domain binds to the same epitope of a cytokine receptor as a chemokine selected from CXCL12, CXCL11, CXCL1, CXCL2, CXCL3, CXCL4, CXCL5, CXCL6, CXCL7, CXCL8, CXCL9, CXCL10, CXCL13, CXCL14, CXCL16, CXCL17, CX3CL1, XCL1, and XCL2. In some embodiments, the first binding domain binds the same epitope on the cytokine receptor as CXCL12. In certain embodiments, the first binding domain binds CXCR7.

[0098] Cytokines are a diverse class of soluble extracellular proteins and can include interleukins, chemokines, interferons, tumor necrosis factors, prolactins, transforming growth factor betas, and lymphokines. Upon binding to their cognate receptors on the surface of cells, cytokines trigger downstream signaling, which is in many cases coupled to internalization of the cytokine-receptor complex. Cytokines exert their action through high-affinity receptors on the cell surface that are linked to pathways of cellular activation, survival, proliferation and differentiation. Cross-linking of receptor subunits on the outside of the cell membrane can lead to abutting of kinases associated with the intracellular receptor tails. This intracellular association of signaling molecules results in phosphorylation of tyrosine residues in the receptor tail and binding of further signaling molecules that have phospho-tyrosine-binding domains. In some instances, different activated receptor cytoplasmic domains can bind a common signaling molecule or family of signaling molecules. Hapel A J and Stanley R E. Cytokines, Receptors and Signaling Pathways Involved in Macrophage and Dendritic Cell Development. In: Madame Curie Bioscience Database. Austin (TX): Landes Bioscience; 2000-2013. Thus, the triggering event (such as the binding of a cytokine to its receptor) required to trigger a cytokine mediated signaling can be much lower than that is required for a non-cytokine receptor. The present disclosure demonstrates that cytokine-mediated internalization could be co-opted for targeted degradation applications. Cytokine is used as its common meaning in the field and refers to a broad category of peptides important in cell signaling. Some non-limiting examples of cytokines include chemokines, interferons, interleukins, prolactins, transforming growth factor betas, lymphokines, and tumor necrosis factors.

[0099] Chemokines, or chemotactic cytokines, are small chemoattractant secreted molecules regulating cell positioning and cell recruitment into tissues, playing a pivotal role in embryogenesis, tissue development and immune response. Approximately 50 chemokines and 20 chemokine receptors have been discovered so far. Chemokines and their receptors have been reported to play important roles in immune cell migration and inflammation, as well as in tumor initiation, promotion, and progression. Marcuzzi E, et al. Chemokines and Chemokine Receptors: Orchestrating Tumor Metastasization. Int J Mol Sci. 2018 Dec. 27; 20(1):96. Chemokines can be widely divided into two major groups based on their prominent functions: inflammatory and homeostatic chemokines. Among inflammatory chemokines, which are induced by inflammation, some non-limiting examples include CXCL1, CXCL2, CXCL3, CXCL5, CXCL7, CXCL8, CXCL9, CXCL10, CXCL11, and CXCL14. On the other hand, homeostatic chemokines such as, without being limited to, CCL14, CCL19, CCL20, CCL21, CCL25, CCL27, CXCL12 and CXCL13 are constitutively expressed and are involved in homeostatic leukocyte trafficking. In some embodiments, the chemokine comprises a CXC chemokine, or an isoform or a derivative capable of binding thereof. In certain non-limiting exemplary embodiments, the chemokine can be CXCL12, CCL1, CCL2, CCL3, CCL3L1, CCL4, CC4L1, CCL5, CCL7, CCL8, CCL11, CCL13, CCL14, CCL15, CCL16, CCL17, CCL18, CCL19, CCL20, CCL21, CCL22, CCL23, CCL24, CCL25, CCL26, CCL27, CCL28, CXCL11, CXCL1, CXCL2, CXCL3, CXCL4, CXCL5, CXCL6, CXCL7, CXCL8, CXCL9, CXCL10, CXCL13, CXCL14, CXCL16, CXCL17, CX3CL1, XCL1, XCL2, vMIPII, U83, and vCXC1. In some embodiments, the chemokine includes CCL1, CCL2, CCL3, CCL3L1, CCL4, CC4L1, CCL5, CCL7, CCL8, CCL11, CCL13, CCL14, CCL15, CCL16, CCL17, CCL18, CCL19, CCL20, CCL21, CCL22, CCL23, CCL24, CCL25, CCL26, CCL27, and CCL28. In some embodiments, the chemokine includes CXCL12, CXCL11, CXCL1, CXCL2, CXCL3, CXCL4, CXCL5, CXCL6, CXCL7, CXCL8, CXCL9, CXCL10, CXCL13, CXCL14, CXCL16, CXCL17, CX3CL1, XCL1, XCL2. In some embodiments the chemokine includes vMIPII, U83, or vCXC1.

[0100] Interleukins are cytokines that play essential roles in the activation and differentiation of immune cells, as well as proliferation, maturation, migration, and adhesion. They also have pro-inflammatory and anti-inflammatory properties. The primary function of interleukins is to modulate growth, differentiation, and activation during inflammatory and immune responses. In certain non-limiting exemplary embodiments, the interleukin can be IL2, IL3, IL4, IL5, IL6, IL7, IL8, IL9, IL10, IL11, IL12A, IL12B, IL13, IL15, IL16, IL17A, IL17B, IL17C, IL17F, IL18, IL19, IL20, IL21, IL22, IL24, IL25, IL26, IL27, IL28A, IL28B, IL29, IL31, IL32, IL33, IL34, IL36A, IL36B, IL36G, IL36RA, IL37, IL38, IL1A, IL1B, IL1RN.

[0101] Interferons belong to the large class of proteins known as cytokines and are made and released by host cells in response to the presence of several viruses. More than twenty distinct IFN genes and proteins have been identified in animals, including humans. They are typically divided among three classes: Type I IFN, Type II IFN, and Type III IFN. In certain non-limiting exemplary embodiments, the interferon can be IFNA, IFNA1, IFNA2, IFNA4, IFNA5, IFNA6, IFNA7, IFNA8, IFNA10, IFNA14, IFNA16, IFNA17, IFNA21, IFNB, and IFNG.

[0102] Prolactins are both hormones and cytokines. Prolactins exert cytokine effects via interference with immune system modulation, mainly inhibiting the negative selection of autoreactive B lymphocytes. In certain non-limiting exemplary embodiments, the prolactin can be EPO, GH1, GH2, PRL, CSF3, LEP, and CSF1.

[0103] Tumor necrosis factors are a multifunctional cytokines that play important roles in diverse cellular events such as cell survival, proliferation, differentiation, and death. In certain non-limiting exemplary embodiments, the tumor necrosis factos can be TNFA, TNFB, TRAIL, TL1, BAFF, APRIL, RANKL, CD40LG, EDA, FASLG, CD70.

[0104] Transforming growth factor betas are multifunctional cytokine belonging to the transforming growth factor superfamily that includes three different mammalian isoforms (TGFB1, TGFB2, TGFB3) and many other signaling proteins. Among its key functions is regulation of inflammatory processes and playing a role in stem cell differentiation as well as T-cell regulation and differentiation. In certain non-limiting exemplary embodiments, the TGF-beta can be TGFB1, TGFB2, TGFB3, GDF15, GDF2, BMP10, INHA, and BMP3.

[0105] The first binding domain of the bispecific binding agents provided herein can also be a growth factor, or an isoform or a derivative capable of binding thereof. A functional derivative of a growth factor can be any agent that possesses the binding activity of a growth factor. For example, in some embodiments, the first binding domain of the bispecific binding agents can be an antagonistic variant of a growth factor which does not have a functional effect but binds to the endogenous cell surface receptors of the growth factor. In this instance, the antagonistic variant of a growth factor is a functional derivative of the growth factor. In other embodiments, the first binding domain of the bispecific binding agents can be a binding agent (e.g., an antibody or a fragment thereof, a peptide, or a small molecule) that binds to the endogenous cell surface receptors of a growth factor. Some non-limiting examples of growth factors include FGF1, FGF2, FGF3, FGF4, FGF5, FGF19, FGF21, FGF23, KGF, VEGF, PDGFA, PDGFB, NGF, NTF3, NTF4, BDNF, IGF1, and IGF2.

[0106] In a proof-of-concept example, chemokine CXCL12 is used as the first binding domain of the bispecific binding agent provided herein. CXCL12 is known to specifically bind to two chemokine receptors, CXCR4 and CXCR7, and subsequently internalize via two distinct mechanisms (FIG. 1A). Binding to CXCR4 agonizes the receptor, leading to its internalization and shuttling to the lysosome for degradation. CXCR7, however, is constitutively internalized and recycled back to the cell surface, independent of ligand binding. Therefore, binding to CXCR7 causes the internalization of CXCL12 without subsequent degradation of CXCR7 or downstream signaling. Thus, the CXCL12/CXCR4/CXCR7 axis served as an ideal system to test our hypothesis. In some non-limiting exemplary embodiments, the present disclosure demonstrates the development of a new targeted degradation platform technology, termed cytokine receptor targeting chimeras (KineTACs), which comprise of fully recombinant bispecific binding agents that utilize CXCL12-mediated internalization of its cognate receptors to target various therapeutically relevant cell surface proteins for lysosomal degradation (FIG. 1B).

[0107] The first binding domain can specifically bind to at least one endogenous cell surface receptor. The first binding domain of the bispecific binding agents provided herein can specifically bind to one or more cell surface receptors. In some embodiments, the first binding domain specifically binds to one cell surface receptor. In some embodiments, the first binding domain specifically binds to no more than two cell surface receptors. In some embodiments, the first binding domain specifically binds to two cell surface receptors. In some embodiments, the endogenous cell surface receptor can be a monomeric receptor. In some embodiments, the endogenous cell surface receptor can form a complex with other molecules (e.g., an integrin).

[0108] The endogenous cell surface receptors can be targeting receptors or recycling receptors. A targeting receptor as used herein refers to an endogenous cell surface receptor that specifically binds to a ligand (e.g., a cytokine, growth factor or an isoform or a derivative capable of binding thereof), and such binding does not necessarily have functional consequences. In certain examples, the binding of the first binding domain to a targeting receptor on the cell surface may not have any functional consequences. In other examples, such binding may lead to internalization, but not necessarily degradation, of the endogenous cell surface receptor and/or the target protein discussed herein. In contrast, a recycling receptor as used herein refers to an endogenous cell surface receptor that specifically binds to a ligand, e.g., a cytokine, a chemokine, a growth factor or an isoform or a derivative capable of binding thereof, and leads to internalization and degradation of the endogenous cell surface receptor and the cell expressing the receptor. In some embodiments, the degradation can occur through delivery of the target protein discussed herein to a lysosome via either a targeting or a recycling receptor.

[0109] In some embodiments, the binding of the first binding domain to the at least one endogenous cell surface receptor results in the internalization of the endogenous cell surface receptor and the bispecific binding agent. In some embodiments, the binding of the first binding domain to the at least one endogenous cell surface receptor results in the degradation of the target protein bound to the bispecific binding agent described herein. In certain embodiments, the binding of the first binding domain to the at least one endogenous cell surface receptor results in the degradation of the target protein bound to the bispecific binding agent described herein, but not the bispecific binding agent.

[0110] In certain embodiments, the endogenous cell surface receptor is membrane associated. Membrane proteins represent about a third of the proteins in living organisms and many membrane proteins are known in the field. Based on their structure, membrane proteins can be largely categorized into three main types: (1) integral membrane protein (IMP), which is permanently anchored or part of the membrane, (2) peripheral membrane protein, which is temporarily attached to the lipid bilayer or to other integral proteins, and (3) lipid-anchored proteins. The most common type of IMP is the transmembrane protein (TM), which spans the entire biological membrane. The endogenous cell surface receptor of the present disclosure include single-pass and multi-pass membrane proteins. Single-pass membrane proteins cross the membrane only once, while multi-pass membrane proteins weave in and out, crossing several times.

[0111] Some non-limiting membrane proteins encompassed herein include cytokine receptors, insulin receptors, cell adhesion proteins or cell adhesion molecules (CAMs), receptor proteins, glycophorin, rhodopsin, Band 3, CD36, glucose permease, ion channels and gates, gap junction proteins, G protein coupled receptors (e.g., beta-adrenergic receptor), and seipin. In some exemplary embodiments, CAMs can include integrins, cadherins, neural cell adhesion molecules (NCAMs), or selectins, etc.

[0112] In some embodiments, the at least one endogenous cell surface receptor includes at least one cytokine receptor. A cytokine receptor can include single-pass and multi-pass membrane-associated receptors. For instance, the cytokine receptor can be a chemokine receptor. Chemokine receptors, which are seven transmembrane spanning proteins coupled to G-proteins, are similarly divided into subfamilies based on their cysteine residues pattern: CXC, CC, CX3C, where C stands for cysteine and X represents non-cysteine amino acids. It has been reported that there is a significant ligand promiscuity among certain chemokine receptors, as some chemokines can bind to and signal through several chemokine receptors, both canonical and atypical ones. In contrast, some chemokines (e.g., CXCL12) are more selective. Some non-limiting example of chemokine receptor include CXCR1, CXCR2, CXCR3, CXCR4, CXCR5, CXCR6, CXCR7 (or ACKR3), XCR1, XCR2, CCR1, CCR2, CCR3, CCR4, CCR5, CCR6, CCR7, CCR8, CCR9, CCR10, CCR11, CX3CR1, ACKR1, ACKR2, ACKR4, and ACKR5. In some embodiments, the chemokine receptor includes CCR1, CCR2, CCR3, CCR4, CCR5, CCR6, CCR7, CCR8, CCR9, CCR10, and CCR11. In some embodiments, the chemokine receptor includes CXCR7, CXCR4, CXCR3, CXCR1, CXCR2, CXCR5, CXCR6, CX3CR1, XCR1, XCR2. In some embodiments, the chemokine receptor includes ACKR1, ACKR2, CXCR7, ACKR4. In some embodiments, the first binding domain of the bispecific binding agent provided herein specifically binds to CXCR4. In some embodiments, the first binding domain of the bispecific binding agent provided herein specifically binds to CXCR7. In certain embodiments, the first binding domain of the bispecific binding agent provided herein specifically binds to CXCR4 and CXCR7.

[0113] In some embodiments, the cytokine receptor can be an interleukin receptor. Interleukin receptors are members of the immunoglobulin superfamily receptors and are transmembrane proteins defined by their structural similarity to immunoglobulins. They often contain an amino-terminal extracellular domain that holds the characteristic immunoglobulin fold. Interluekin receptors are typically involved with cell adhesion and the interaction between T cells and antigen presenting cells. Some non-limiting examples of interleukin receptors include CD25, IL2RB, IL2RG, IL3RA, IL4R, IL13RA1, IL13RA2, IL5RA, IL6R, IL7R, IL8R, IL9R, IL10RA, IL10RB, IL11RA, IL12RB1, IL12RB2, IL15RA, CD4, IL17RA, IL17RC, IL17RB, IL17RE, IL27RA, IL18R1, IL20RA, IL20RB, IL22RA1, IL21R, IL28RA, IL31RA, ST2, IL1RAP, CSF1R, IL1R1, IL1RL2, IL1R2.

[0114] In some embodiments, the cytokine receptor can be an interferon receptor. All receptors involved in interferon signal transduction are classified as class II helical cytokine receptors (hCRs) sharing homologous structural folds and basic structural elements with other proteins including tissue factor, and the receptors for IL-10, IL-20 and IL-22. 4 In the extracellular region, all members of this class of hCR have tandem domains consisting of ˜100 amino acids each housing a type III fibronectin (FBN-III) domain with topology analogous to the immunoglobulin constant domain. With the exception of IFNAR1, which has a four-domain architecture, all other IFN receptors consist of two FBN-III domains. Some non-limiting examples of interferon receptors include IFNAR1, IFNAR2, IFNGR1, IFNGR2.

[0115] In some embodiments, the cytokine receptor can be a prolactin receptor. The prolactin receptor (PRLR) is a membrane-bound, type I cytokine receptor. Some non-limiting examples of prolactin receptors include EPOR, GHR, PRLR, CSF3R, LEPR, CSF1R.

[0116] In some embodiments, the cytokine receptor can be a tumor necrosis factor (TNF) receptor. In their active form, the majority of TNF receptors form trimeric complexes in the plasma membrane. Most TNF receptors contain transmembrane domains (TMDs), although some can be cleaved into soluble forms (e.g. TNFR1), and some lack a TMD entirely (e.g. DcR3). TNF receptors are primarily involved in apoptosis and inflammation, but they can also take part in other signal transduction pathways, such as proliferation, survival, and differentiation. Some non-limiting examples of TNF receptors include TNFR1, TNFR2, DR4, DR5, DCR1, DCR2, DR3, LTBR, BAFFR, TACI, OPG, RANK, CD40, EDAR, DCR3, FAS, and CD27.

[0117] In other embodiments, the at least one endogenous cell surface receptor includes at least one growth factor receptor. All growth factor receptors are membrane-bound and include an extracellular domain, a transmembrane domain, and a cytoplasmic domain. Some non-limiting examples of growth factor receptors are FGFR2B, VEGFR2, PDGFRA, PDGFRB, NGFR, TRKC, TRKB, M6PR, and IGF1R.

[0118] The bispecific binding agents provided herein further include a second binding domain that can specifically bind to a target protein. The target protein can be a soluble target protein and a membrane-associated target protein. In some embodiments, the second binding domain of the bispecific binding agents provided herein can bind to an extracellular epitope of a membrane-associated target protein. The binding of the second binding domain to the membrane-associated target protein can result in the internalization of a target cell expressing the membrane-associated target protein.

[0119] In some embodiments, the target protein of the bispecific binding agents provided herein can be an immune checkpoint protein. Immune checkpoint proteins are known in the field, and generally refers to proteins that serve as checkpoints produced by some types of immune system cells, such as T cells, and some cancer cells. Some non-limiting examples of immune checkpoint proteins include PD-L1, PD-1, CTLA-4, B7-H3, B7-H4, BTLA, KIR, LAG3, NKG2D, TIM-3, VISTA, SIGLEC7, and SIGLEC15.

[0120] In some embodiments, the target protein of the bispecific binding agents provided herein can be a cancer antigen. In some embodiments, cancer antigens are proteins that are expressed on the surface of certain cancer cells. In other embodiments, cancer antigens are shed by the cancer cells and can be detected in blood and sometimes other body fluids. Thus, cancer antigens can include both cell membrane-associated target proteins and soluble target proteins. Some non-limiting examples of the cancer antigens include PD-L1, HER2, EGFR, A2AR, CDCP1, MMP14, and TROP2. In other embodiments, the second binding domain can be an antigen-binding domain from any antigen-binding molecules, such as any of the clinically approved antibodies, known or to be developed. Some exemplary therapeutic monoclonal antibodies approved or in review in the EU or US are provided in Table 1 below.

TABLE 1
Therapeutic monoclonal antibodies approved or in review in the EU or US.

| | | | 1st indication approved/ |
|---|---|---|---|
| INN | Brand name | Target; Format | reviewed |
| Toripalimab | Tuoyi | PD-1; Humanized IgG4 | Nasopharyneal carcinoma |
| Tisotumab | (Pending) | Tissue factor; Human IgG1 | Cervical cancer |
| vedotin | | ADC | |
| Retifanlimab | (Pending) | PD-1; Humanized IgG4 | Squamous cell carcinoma |
| | | | of the anal canal |
| Amivantamab | (Pending) | EGFR, cMET; Human | NSCLC w/EGFR exon 20 |
| | | bispecific IgG1 | insertion mutations |
| Ublituximab | (Pending) | CD20; Chimeric IgG1 | Chronic lymphocytic |
| | | | leukemia |
| Anifrolumab | (Pending) | IFNAR1; Human IgG1 | Systemic lupus |
| | | | erythematosus |
| Loncastuximab | (Pending) | CD19; Humanized IgG1 ADC | Diffuse large B-cell |
| tesirine | | | lymphoma |
| Balstilimab | (Pending) | PD-1; Human IgG4 | Cervical cancer |
| Bimekizumab | (Pending) | IL-17A, F; Humanized IgG1 | Psoriasis |
| Tralokinumab | (Pending) | IL-13; Human IgG4 | Atopic dermatitis |
| Evinacumab | Evkeeza | Angiopoietin-like 3; Human | Homozygous familial |
| | | IgG4 | hypercholesterolemia |
| Sutimlimab | (Pending) | C1s; Humanized IgG4 | Cold agglutinin disease |
| Aducanumab | (Pending) | Amyloid beta; Human IgG1 | Alzheimer's disease |
| Teplizumab | (Pending) | CD3; Humanized IgG1 | Type 1 diabetes |
| Dostarlimab | (Pending) | PD-1; Humanized IgG4 | Endometrial cancer |
| Tanezumab | (Pending) | Nerve growth factor; | Osteoarthritis pain |
| | | Humanized IgG2 | |
| Inolimomab | (Pending) | CD25; Mouse IgG1 | Host vs. graft disease |
| Oportuzumab | (Pending) | EpCAM; Humanized scFv | Bladder cancer |
| monatox | | immunotoxin | |
| Narsoplimab | (Pending) | MASP-2; Human IgG4 | Hematopoietic stem cell |
| | | | transplant-associated |
| | | | thrombotic |
| | | | microangiopathies |
| Ansuvimab | Ebanga | Ebola virus; Human IgG1 | Ebola infection |
| Margetuximab | MARGENZA | HER2; Chimeric IgG1 | HER2+ breast cancer |
| Naxitamab | DANYELZA | GD2; Humanized IgG1 | High-risk neuroblastoma |
| | | | and refractory |
| | | | osteomedullary disease |
| Atoltivimab, | Inmazeb | Ebola virus; mixture of 3 | Ebola virus infection |
| Maftivimab, and | | human IgG1 | |
| Odesivimab- | | | |
| ebgn | | | |
| Belantamab | BLENREP | BCMA; Humanized IgG1 ADC | Multiple myeloma |
| mafodotin | | | |
| Tafasitamab | Monjuvi | CD19; Humanized IgG1 | Diffuse large B-cell |
| | | | lymphoma |
| Satralizumab | Enspryng | IL-6R; Humanized IgG2 | Neuromyelitis optica and |
| | | | neuromyelitis optica |
| | | | spectrum disorders |
| Inebilizumab | Uplizna | CD19; Humanized IgG1 | Neuromyelitis optica and |
| | | | neuromyelitis optica |
| | | | spectrum disorders |
| Sacituzumab | Trodelvy | TROP-2; Humanized IgG1 | Triple-neg. breast cancer |
| govitecan | | ADC | |
| Teprotumumab | Tepezza | IGF-1R; Human IgG1 | Thyroid eye disease |
| Isatuximab | Sarclisa | CD38; Chimeric IgG1 | Multiple myeloma |
| Eptinezumab | Vyepti | CGRP; Humanized IgG1 | Migraine prevention |
| [fam]- | Enhertu | HER2; Humanized IgG1 ADC | HER2+ breast cancer |
| trastuzumab | | | |
| deruxtecan | | | |
| Enfortumab | Padcev | Nectin-4; Human IgG1 ADC | Urothelial cancer |
| vedotin | | | |
| Crizanlizumab | Adakveo | P-selectin; Humanized IgG2 | Sickle cell disease |
| Brolucizumab | BEOVU | VEGF-A; Humanized scFv | Macular degeneration |
| Polatuzumab | Polivy | CD79b; Humanized IgG1 ADC | Diffuse large B-cell |
| vedotin | | | lymphoma |
| Risankizumab | Skyrizi | IL-23p19; Humanized IgG1 | Plaque psoriasis |
| Romosozumab | Evenity | Sclerostin; Humanized IgG2 | Osteoporosis in |
| | | | postmenopausal women at |
| | | | risk of fracture |
| Caplacizumab | Cablivi | von Willebrand factor; | Acquired thrombotic |
| | | Humanized Nanobody | thrombo- cytopenic |
| | | | purpura |
| Ravulizumab | Ultomiris | C5; Humanized IgG2/4 | Paroxysmal nocturnal |
| | | | hemoglobinuria |
| Emapalumab | Gamifant | IFNgamma; Human IgG1 | Primary hemophagocytic |
| | | | lymphohistiocytosis |
| Cemiplimab | Libtayo | PD-1; Human IgG4 | Cutaneous squamous cell |
| | | | carcinoma |
| Fremanezumab | Ajovy | CGRP; Human IgG2 | Migraine prevention |
| Moxetumomab | Lumoxiti | CD22; Murine IgG1 dsFv | Hairy cell leukemia |
| pasudotox | | immunotoxin | |
| Galcanezumab | Emgality | CGRP; Human IgG4 | Migraine prevention |
| Lanadelumab | Takhzyro | Plasma kallikrein; Human IgG1 | Hereditary angioedema |
| | | | attacks |
| Mogamulizumab | Poteligeo | CCR4; Humanized IgG1 | Cutaneous T cell |
| | | | lymphoma |
| Erenumab | Aimovig | CGRP receptor; Human IgG2 | Migraine prevention |
| Tildrakizumab | Ilumya | IL-23p19; Humanized IgG1 | Plaque psoriasis |
| Ibalizumab | Trogarzo | CD4; Humanized IgG4 | HIV infection |
| Burosumab | Crysvita | FGF23; Human IgG1 | X-linked |
| | | | hypophosphatemia |
| Durvalumab | IMFINZI | PD-L1; Human IgG1 | Bladder cancer |
| Emicizumab | Hemlibra | Factor IXa, X; Humanized | Hemophilia A |
| | | IgG4, bispecific | |
| Benralizumab | Fasenra | IL-5Rα; Humanized IgG1 | Asthma |
| Ocrelizumab | OCREVUS | CD20; Humanized IgG1 | Multiple sclerosis |
| Guselkumab | TREMFYA | IL-23 P19; Human IgG1 | Plaque psoriasis |
| Inotuzumab | BESPONSA | CD22; Humanized IgG4, ADC | Hematological malignancy |
| ozogamicin | | | |
| Sarilumab | Kevzara | IL-6R; Human IgG1 | Rheumatoid arthritis |
| Dupilumab | Dupixent | IL-4Rα; Human IgG4 | Atopic dermatitis |
| Avelumab | Bavencio | PD-L1; Human IgG1 | Merkel cell carcinoma |
| Brodalumab | Siliq, | IL-17R; Human IgG2 | Plaque psoriasis |
| | LUMICEF | | |
| Atezolizumab | Tecentriq | PD-L1; Humanized IgG1 | Bladder cancer |
| Bezlotoxumab | Zinplava | Clostridium difficile | Prevention of Clostridium |
| | | enterotoxin B; Human | difficile infection |
| | | IgG1 | recurrence |
| Olaratumab | Lartruvo | PDGRFα; Human IgG1 | Soft tissue sarcoma |
| Reslizumab | Cinqaero, | IL-5; Humanized IgG4 | Asthma |
| | Cinqair | | |
| Obiltoxaximab | Anthim | Protective antigen of B. | Prevention of inhalational |
| | | anthracis exotoxin; Chimeric | anthrax |
| | | IgG1 | |
| Ixekizumab | Taltz | IL-17a; Humanized IgG4 | Psoriasis |
| Daratumumab | Darzalex | CD38; Human IgG1 | Multiple myeloma |
| Elotuzumab | Empliciti | SLAMF7; Humanized IgG1 | Multiple myeloma |
| Necitumumab | Portrazza | EGFR; Human IgG1 | Non-small cell lung cancer |
| Idarucizumab | Praxbind | Dabigatran; | Reversal of dabigatran- |
| | | Humanized Fab | induced anticoagulation |
| Alirocumab | Praluent | PCSK9; Human IgG1 | High cholesterol |
| Mepolizumab | Nucala | IL-5; Humanized IgG1 | Severe eosinophilic |
| | | | asthma |
| Evolocumab | Repatha | PCSK9; Human IgG2 | High cholesterol |
| Dinutuximab | Unituxin | GD2; Chimeric IgG1 | Neuroblastoma |
| Secukinumab | Cosentyx | IL-17a; Human IgG1 | Psoriasis |
| Nivolumab | Opdivo | PD1; Human IgG4 | Melanoma, non-small cell |
| | | | lung cancer |
| Blinatumomab | Blincyto | CD19, CD3; Murine bispecific | Acute lymphoblastic |
| | | tandem scFv | leukemia |
| Pembrolizumab | Keytruda | PD1; Humanized IgG4 | Melanoma |
| Ramucirumab | Cyramza | VEGFR2; Human IgG1 | Gastric cancer |
| Vedolizumab | Entyvio | α4β7 integrin; Humanized | Ulcerative colitis, Crohn |
| | | IgG1 | disease |
| Siltuximab | Sylvant | IL-6; Chimeric IgG1 | Castleman disease |
| Obinutuzumab | Gazyva | CD20; Humanized IgG1; | Chronic lymphocytic |
| | | Glycoengineered | leukemia |
| Ado- | Kadcyla | HER2; Humanized IgG1, ADC | Breast cancer |
| trastuzumab | | | |
| emtansine | | | |
| Raxibacumab | (Pending) | B. anthrasis PA; Human IgG1 | Anthrax infection |
| Pertuzumab | Perjeta | HER2; Humanized IgG1 | Breast Cancer |
| Brentuximab | Adcetris | CD30; Chimeric IgG1, ADC | Hodgkin lymphoma, |
| vedotin | | | systemic anaplastic large |
| | | | cell lymphoma |
| Belimumab | Benlysta | BLyS; Human IgG1 | Systemic lupus |
| | | | erythematosus |
| Ipilimumab | Yervoy | CTLA-4; Human IgG1 | Metastatic melanoma |
| Denosumab | Prolia | RANK-L; Human IgG2 | Bone Loss |
| Tocilizumab | RoActemra, | IL-6R; Humanized IgG1 | Rheumatoid arthritis |
| | Actemra | | |
| Ofatumumab | Arzerra | CD20; Human IgG1 | Chronic lymphocytic |
| | | | leukemia |
| Canakinumab | Ilaris | IL-1β; Human IgG1 | Muckle-Wells syndrome |
| Golimumab | Simponi | TNF; Human IgG1 | Rheumatoid and psoriatic |
| | | | arthritis, ankylosing |
| | | | spondylitis |
| Ustekinumab | Stelara | IL-12/23; Human IgG1 | Psoriasis |
| Certolizumab | Cimzia | TNF; Humanized Fab, | Crohn disease |
| pegol | | pegylated | |
| Catumaxomab | Removab | EPCAM/CD3; Rat/mouse | Malignant ascites |
| | | bispecific mAb | |
| Eculizumab | Soliris | C5; Humanized IgG2/4 | Paroxysmal nocturnal |
| | | | hemoglobinuria |
| Ranibizumab | Lucentis | VEGF; Humanized IgG1 Fab | Macular degeneration |
| Panitumumab | Vectibix | EGFR; Human IgG2 | Colorectal cancer |
| Natalizumab | Tysabri | a4 integrin; Humanized IgG4 | Multiple sclerosis |
| Bevacizumab | Avastin | VEGF; Humanized IgG1 | Colorectal cancer |
| Cetuximab | Erbitux | EGFR; Chimeric IgG1 | Colorectal cancer |
| Efalizumab | Raptiva | CD11a; Humanized IgG1 | Psoriasis |
| Omalizumab | Xolair | IgE; Humanized IgG1 | Asthma |
| Tositumomab- | Bexxar | CD20; Murine IgG2a | Non-Hodgkin lymphoma |
| I131 | | | |
| Ibritumomab | Zevalin | CD20; Murine IgG1 | Non-Hodgkin lymphoma |
| tiuxetan | | | |
| Adalimumab | Humira | TNF; Human IgG1 | Rheumatoid arthritis |
| Alemtuzumab | MabCampath, | CD52; Humanized IgG1 | Chronic myeloid |
| | Campath-1H; | | leukemia#; multiple |
| | Lemtrada | | sclerosis |
| Gemtuzumab | Mylotarg | CD33; Humanized IgG4, ADC | Acute myeloid leukemia |
| ozogamicin | | | |
| Trastuzumab | Herceptin | HER2; Humanized IgG1 | Breast cancer |
| Infliximab | Remicade | TNF; Chimeric IgG1 | Crohn disease |
| Palivizumab | Synagis | RSV; Humanized IgG1 | Prevention of respiratory |
| | | | syncytial virus infection |
| Basiliximab | Simulect | IL-2R; Chimeric IgG1 | Prevention of kidney |
| | | | transplant rejection |
| Daclizumab | Zenapax; | IL-2R; Humanized IgG1 | Prevention of kidney |
| | Zinbryta | | transplant rejection; |
| | | | multiple sclerosis |
| Rituximab | MabThera, | CD20; Chimeric IgG1 | Non-Hodgkin lymphoma |
| | Rituxan | | |
| Abciximab | Reopro | GPIIb/IIIa; Chimeric IgG1 Fab | Prevention of blood clots |
| | | | in angioplasty |
| Edrecolomab | Panorex | EpCAM; Murine IgG2a | Colorectal cancer |
| Nebacumab | Centoxin | Endotoxin; Human IgM | Gram-negative sepsis |
| Muromonab- | Orthoclone | CD3; Murine IgG2a | Reversal of kidney |
| CD3 | Okt3 | | transplant rejection |

[0121] In some embodiments, the target protein of the bispecific binding agents provided herein can be an immunomodulatory protein. Immunomodulatory proteins can refer to any proteins that have immunomodulatory activities. For instance, an immunomodulatory protein can have the signaling activity upon a certain stimulation that leads to either increased activity of immune cells (i.e., immune activation) or decreased activity of immune cells (i.e., immune suppression). Some immunomodulatory proteins may also have immune checkpoint activities. Thus, in some instances, immunomodulatory proteins could overlap with immune checkpoint proteins. Some non-limiting examples of the immuno-modulatory proteins include PD-L1, PD-1, CTLA-4, B7-H3, B7-H4, LAG3, NKG2D, TIM-3, VISTA, CD39, CD73 (NT5E), A2AR, SIGLEC7, and SIGLEC15.

[0122] In some embodiments, the target protein can be a B cell antigen. In some instances, the B cell antigen can be a B cell surface marker, e.g., a specific marker of B cell lineage. Some non-limiting examples of B cell antigens include CD19, CD20, D22, CD23, CD24, CD37, CD40, and HLA-DR. In some embodiments, the target protein can also be a T cell marker. T cell markers can be T cell surface bound or secreted (i.e., extracellular). Some non-limiting examples of T cell markers include CD27, CD28, CD127, PD-1, CD122, CD132, KLRG-1, HLA-DR, CD38, CD69, CD11a, CD58, CD99, CD62L, CD103, CCR4, CCR5, CCR6, CCR9, CCR10, CXCR3, CXCR4, CLA, Granzyme A, Granzyme B, Perforin, CD161, IL-18Ra, c-Kit, and CD130.

[0123] In some embodiments, the target protein can be an inflammation receptor. Some non-limiting exemplary inflammation receptors include TNFR, IL1R, IL2Ralpha, IL2Rbeta.

[0124] Other cancer antigens, immuno-modulatory proteins, inflammation receptors, B cell antigens, and T cell marker are known in the field and are also encompassed by the present disclosure. In certain embodiments, some non-limiting examples of the target proteins include PD-L1, HER2, EGFR, PD-1, CTLA-4, A2AR, B7-H3, B7-H4, BTLA, KIR, LAG3, NKG2D, TIM-3, VISTA, LAG3, NKG2D, TIM, SIGLEC7, SIGLEC15, CD19, CD20, CDCP1, MMP14, and TROP2.

[0125] In some embodiments, the bispecific binding agent comprises a first binding domain that binds to the same epitope on a cytokine receptor as a chemokine selected from CCL1, CCL2, CCL3, CCL3L1, CCL4, CC4L1, CCL5, CCL7, CCL8, CCL11, CCL13, CCL14, CCL15, CCL16, CCL17, CCL18, CCL19, CCL20, CCL21, CCL22, CCL23, CCL24, CCL25, CCL26, CCL27, and CCL28 and a second binding domain that binds to a target protein selected from EGFR, PD-L1 and HER2. In some embodiments, the bispecific binding agent comprises a first binding domain that binds to the same epitope on a cytokine receptor as a chemokine selected from CXCL12, CXCL11, CXCL1, CXCL2, CXCL3, CXCL4, CXCL5, CXCL6, CXCL7, CXCL8, CXCL9, CXCL10, CXCL13, CXCL14, CXCL16, CXCL17, CX3CL1, XCL1, and XCL2 and a second binding domain that binds to protein selected from EGFR, PD-L1 and HER2. In some embodiments, the bispecific binding agent comprises a first binding domain that binds the same epitope on the cytokine receptor as CXCL12 and the second binding domain binds to a target protein selected from EGFR, PD-L1 and HER2. In some embodiments, the bispecific binding agent comprises a first binding domain that binds the same epitope on the cytokine receptor as CXCL12 and the second binding domain binds to a protein selected from EGFR. In some embodiments, the bispecific binding agent comprises a first binding domain binds the same epitope on the cytokine receptor as CXCL12 and the second binding domain binds to a protein selected from PD-L1. In certain embodiments, the bispecific binding agent comprises a first binding domain that binds CXCR7 and a second binding domain that binds to a protein selected from EGFR, PD-L1 and HER2. In certain embodiments, the bispecific binding agent described herein is a bispecific antibody.

[0126] In certain embodiments, the bispecific binding agent described herein is not an immunoconjugate or a portion thereof. For example, the bispecific binding agent is not an antibody-drug conjugate. In certain embodiments, the bispecific binding agent described herein does not comprise a cytotoxic agent or a small molecule immune modulatory agent. In certain embodiments, the bispecific binding agent does not comprise a small molecule therapeutic agent.

[0127] Without being bound by theory, in the cases where the target protein is a membrane-associated target protein, the target cell needs to express both the membrane-associated target protein and the endogenous cell surface receptor. For instance, a bispecific binding agent provided herein comprises (1) a first binding domain which has CXCL12 Fc or a variant thereof that specifically binds to CXCR4 and/or CXCR7, and (2) a second binding domain which includes a Fab targeting PD-L1. In this case, the target cell needs to express (1) CXCR4 and/or CXCR7 and (2) PD-L1.

[0128] As mentioned above, in some embodiments, the bispecific binding agents of the present disclosure can specifically bind to an extracellular epitope of a membrane-associated target protein, and such binding can result in the membrane-associated target protein bound to the bispecific binding agent. Thus, one skilled in the art would appreciate that any cell expressing a target protein could be a target cell for the purpose of the present disclosure. For example, the target cells encompassed by the present can be a neoplastic cell. A neoplasm is an abnormal growth of cells. Neoplastic cells are cells that are undergoing or have undergone an abnormal growth. In some instances, these abnormally growing cells can cause tumor growth and can be both benign and malignant.

[0129] Alternatively, the target cells encompassed by the present disclosure can be cancer cells. Some non-limiting examples of target cells include cancer cells, such as cells from breast cancer, B cell lymphoma, pancreatic cancer, Hodgkin's lymphoma, ovarian cancer, prostate cancer, mesothelioma, lung cancer, non-Hodgkin's B-cell (B-NHL), melanoma, chronic lymphocytic leukemia, acute lymphocytic leukemia, neuroblastoma, glioma, glioblastoma, bladder cancer, and colorectal cancer.

[0130] In other embodiments, the target cells can be immune cells. For instance, the immune cells can be monocytes, macrophages, lymphocytes (e.g., natural killer cells, T cells, and B cells), and monocytes.

[0131] The second binding domain of the bispecific binding agents provided herein can also bind to soluble target proteins. In certain embodiments, the soluble target proteins include soluble extracellular proteins. For example, the soluble target protein that can be targeted by the bispecific binding agents provided herein include an inflammatory cytokine, a growth factor (GF), a toxic enzyme, a target associated with metabolic diseases, a neuronal aggregate, or an autoantibody. These various soluble proteins are known in the art. In some embodiments, non-limiting examples of the inflammatory cytokine include lymphotoxin, interleukin-1 (IL-1), IL-2, IL-5, IL-6, IL-12, IL-13, IL-17, IL-18, IL-23, tumor necrosis factor alpha (TNF-α), interferon gamma (IFNγ), and granulocyte-macrophage colony stimulating factor (GM-CSF). In other embodiments, non-limiting examples of the growth factor comprises EGF, FGF, NGF, PDGF, VEGF, IGF, GMCSF, GCSF, TGF, RANK-L, erythropieitn, TPO, BMP, HGF, GDF, neurotrophins, MSF, SGF, GDF, and an isoform thereof. In some embodiments, non-limiting examples of the toxic enzyme comprises a protein arginine deiminase 1 (PAD1), PAD2, PAD3, PAD4, and PAD6, leucocidin, hemolysin, coagulase, treptokinase, hyaluronidase. In certain embodiments, the toxic enzyme comprises PAD2 or PAD4. In some embodiments, the target associated with a metabolic disease can be PCSK9, HRD1 T2DM, and MOGAT2. In other embodiments, non-limiting examples of the neuronal aggregate comprises Aβ, TTR, α-synuclein, TAO, and prion. In certain embodiments, the autoantibody comprises IgA, IgE, IgG, IgM, and IgD. Target proteins associated with the conditions described herein are known in the field and new targets are being discovered. All of the known and to be discovered targets are encompassed herein.

[0132] In some embodiments, once bound by the scond binding domain, the target protein is internalized at least 5%, 10%, 20%, 30%, 40%, 50%, 60%, 70%, 80%, 90% greater than a control. In one embodiment, the target protein is VEGF, when bound by the bispecific agent described herein, it is internalized 40% more than control.

[0133] The bispecific binding agents of the present disclosure can generally take the form of a protein, glycoprotein, lipoprotein, phosphoprotein, and the like. Some bispecific binding agent of the disclosure take the form of bispecific antibodies or antibody derivatives. In some embodiments, the first binding domain and the second binding domain of the bispecific binding agent provided herein can each be independently selected from the group consisting of natural ligands or a fragment, derivative, or small molecule mimetic thereof, antibodies, half antibodies, single-domain antibodies, nanobodies, Fabs, monospecific Fab2, Fc, scFv, minibodies, IgNAR, V-NAR, hcIgG, VHH domain, camelid antibodies, and peptibodies. In some embodiments, the first binding domain and the second binding domain of the bispecific binding agent provided herein together can form a bispecific antibody, a bispecific diabody, a bispecific Fab2, a bispecific camelid antibody, or a bispecific peptibody scFv-Fc, a bispecific IgG, and a knob and hole bispecific IgG, a Fc-Fab, and a knob and hole bispecific Fc-Fab, a cytokine-IgG fusion, a cytokine-Fab fusion, a cytokine-Fc-scFv fusion.

[0134] For example, one can employ known techniques such as phage display to generate and select for small proteins having a binding domain similar to an antibody complementarity-determining region (CDR). In some embodiments, the first or second binding domain includes a scFv. In other embodiments, the first or second binding domain includes a Fab. The first binding domain can also be derived from a natural or synthetic ligand that specifically binds to at least one endogenous cell surface receptor, for example, without limitation, a cytokine receptor, and the like. The second binding domain can be derived from any known or to be developed antigen binding agents, e.g., any therapeutic antibodies, that specifically binds to target protein, whether soluble or membrane-associated.

[0135] The binding domains can include naturally-occurring amino acid sequences or can be engineered, designed, or modified so as to provide desired and/or improved properties, e.g., binding affinity. Generally, the binding affinity of an antigen-binding moiety, e.g., an antibody, for a target antigen (e.g., PD-L1) can be calculated by the Scatchard method described by Frankel et al., Mol Immunol (1979) 16:101-06. In some embodiments, binding affinity is measured by an antigen/antibody dissociation rate. In some embodiments, binding affinity is measured by a competition radioimmunoassay. In some embodiments, binding affinity is measured by ELISA. In some embodiments, antibody affinity is measured by flow cytometry. In some embodiments, binding affinity is measured by bio-layer interferometry. An antibody that selectively binds an antigen (such as PD-L1) when it is capable of binding that antigen with high affinity, without significantly binding other antigens.

[0136] Bispecific antibodies can be prepared by known methods. Embodiments of the disclosure include “knob-into-hole” bispecific antibodies, wherein the otherwise symmetric dimerization region of a bispecific binding agent is altered so that it is asymmetric. For example, a knob-into-hole bispecific IgG that is specific for antigens A and B can be altered so that the Fc portion of the A-binding chain has one or more protrusions (“knobs”), and the Fc portion of the B-binding chain has one or more hollows (“holes”), where the knobs and holes are arranged to interact. This reduces the homodimerization (A-A and B-B antibodies), and promotes the heterodimerization desired for a bispecific binding agent. See, e.g., Y. Xu et al., mAbs (2015) 7(1):231-42. In some embodiments, the bispecific binding agent has a knob-into-hole design. In some embodiments, the “knob” comprises a T336W alteration of the CH3 domain, i.e., the threonine at position 336 is replaced by a tryptophan. In some embodiments, the “hole” comprises one or a combination of T366S, L368A, and Y407V. In some embodiments, the “hole” comprises T366S, L368A, and Y407V. For example, an illustration is provided in FIG. 2A. In some exemplary embodiments, the “knob” constant region comprises a sequence set forth in SEQ ID NO: 1, 8, 10, 12, 28, and 34 or a portion of any one thereof. In some embodiments, the heavy chain Fc “knob” constant region has a histidine tag. In some exemplary embodiments, the heavy chain Fc “hole” constant region comprises SEQ ID NO: 2, 3, 5, 6, 9, 11, 13-20, 22, 24, 26, 29, 35, and 38 or a portion of any one thereof. In certain embodiments, an exemplary CH2-CH3 domain sequence of a Knob construct comprises a N297G. In other embodiments, an exemplary CH2-CH3 domain sequence of a Hole construct comprises N297G.

[0137] In other embodiments, the “knob” and the “hole” constant regions comprise sequences that are about 70%, 75%, 80%, 85%, 90%, 95%, 99% identical to the sequences provided herein. For example, see Table 1 for exemplary constructs and sequences.

[0138] In some embodiments, the first binding domain of the bispecific binding agent provided herein comprises an Fc-fusion (e.g, a chemokine or variant fused to an Fc). In some embodiments, the second binding domain comprises an Fc-Fab. In some embodiments, the second binding domain comprises an scFv. In one exemplary embodiment, the bispecific binding agent includes a first binding domain that comprises an Fc-fusion, and the second binding domain that comprises an Fc-Fab. In another exemplary embodiment, the bispecific binding agent includes a a first binding domain that comprises an Fc-fusion, and the second binding domain comprises an scFv. By way of example, a cytokine can be N-terminally fused to an Fc domain, and the scFv can be fused to the C-terminus of the Fc. In an alternative embodiment, a cytokine can be C-terminally fused to an Fc domain, and the scFv can be fused to the N-terminus of the Fc. In some embodiments, the endogenous cell surface receptor to which the first binding domain binds to is referred to as a degrader, and the target protein of the second binding domain is referred to a victim.

[0139] In some embodiments, the first binding domain of the bispecific binding agent provided herein comprises e.g., a cytokine, and the second binding domain comprises an IgG. By way of example, a cytokine can be fused off the N-terminus of the heavy chain of the IgG, off the N-terminus of the light chain of the IgG, off the C-terminus of the light chain of the IgG, or off the C-terminus of the heavy chain of the IgG. In some embodiments, one to two cytokines can be fused per IgG.

[0140] In some embodiments, the first binding domain of the bispecific binding agent provided herein comprises e.g., a cytokine, which is fused to the second binding domain which comprises a Fab or scFv.

[0141] Without being bound by theory, the present disclosure provides some exemplary bispecific binding agents (a.k.a., KineTACs) that comprises chemokine CXCL12 or variants thereof in a Knob-Fc format as the first binding domain, and a Fab in a Hole-Fc format that specifically binds to various targets, including PD-L1, HER2, EGFR, and CDCP1, as the second binding domain. In certain embodiments, the CXCL12 variants comprise one or a combination of mutations selected from ΔKP at residues 1-2, ΔKPVS at residues 1-4, and R8E. Table 2 below provides some exemplary designs and sequences of the bispecific binding agents of the present disclosure.

TABLE 2
Exemplary design and sequences of the bispecific binding agents.

| | | | SEQ |
|---|---|---|---|
| Construct | | | ID |
| Name | | Construct Sequence | NO |
| CXCL12- | Knob: | KPVSLSYRCPCRFFESHVARANVKHLKILNTPNCALQIVARLKNNNRQVCIDPKLKW | 1 |
| Tecentriq | | IQEYLEKALNPWEPKSCDKTHTCPPCPAPELLGGPSVFLFPPKPKDTLMISRTPEVT | |
| | | CVVVDVSHEDPEVKFNWYVDGVEVHNAKTKPREEQYGSTYRVVSVLTVLHQDWLNGK | |
| | | EYKCKVSNKALPAPIEKTISKAKGQPREPQVYTLPPSRDELTKNQVSLWCLVKGFYP | |
| | | SDIAVEWESNGQPENNYKTTPPVLDSDGSFFLYSKLTVDKSRWQQGNVFSCSVMHEA | |
| | | LHNHYTQKSLSLSPGKGGSHHHHHH | |
| | Hole: | EVQLVESGGGLVQPGGSLRLSCAASGFTFSDSWIHWVRQAPGKGLEWVAWISPYGGS | 2 |
| | | TYYADSVKGRFTISADTSKNTAYLQMNSLRAEDTAVYYCARRHWPGGFDYWGQGTLV | |
| | | TVSSASTKGPSVFPLAPSSKSTSGGTAALGCLVKDYFPEPVTVSWNSGALTSGVHTF | |
| | | PAVLQSSGLYSLSSVVTVPSSSLGTQTYICNVNHKPSNTKVDKKVEPKSCEPKSCDK | |
| | | THTCPPCPAPELLGGPSVFLFPPKPKDTLMISRTPEVTCVVVDVSHEDPEVKENWYV | |
| | | DGVEVHNAKTKPREEQYGSTYRVVSVLTVLHQDWLNGKEYKCKVSNKALPAPIEKTI | |
| | | SKAKGQPREPQVYTLPPSRDELTKNQVSLSCAVKGFYPSDIAVEWESNGQPENNYKT | |
| | | TPPVLDSDGSFFLVSKLTVDKSRWQQGNVFSCSVMHEALHNHYTQKSLSLSPGKGGS | |
| | | GAWSHPQFEK | |
| | L: | DIQMTQSPSSLSASVGDRVTITCRASQDVSTAVAWYQQKPGKAPKLLIYSASFLYSG | 40 |
| | | VPSRFSGSGSGTDFTLTISSLQPEDFATYYCQQYLYHPATFGQGTKVEIKRTVAAPS | |
| | | VFIFPPSDEQLKSGTASVVCLLNNFYPREAKVQWKVDNALQSGNSQESVTEQDSKDS | |
| | | TYSLSSTLTLSKADYEKHKVYACEVTHQGLSSPVTKSENRGEC | |
| CXCL12- | Knob: | KPVSLSYRCPCRFFESHVARANVKHLKILNTPNCALQIVARLKNNNRQVCIDPKLKW | 1 |
| Trastuzumab | | IQEYLEKALNPWEPKSCDKTHTCPPCPAPELLGGPSVFLFPPKPKDTLMISRTPEVT | |
| | | CVVVDVSHEDPEVKFNWYVDGVEVHNAKTKPREEQYGSTYRVVSVLTVLHQDWLNGK | |
| | | EYKCKVSNKALPAPIEKTISKAKGQPREPQVYTLPPSRDELTKNQVSLWCLVKGFYP | |
| | | SDIAVEWESNGQPENNYKTTPPVLDSDGSFFLYSKLTVDKSRWQQGNVFSCSVMHEA | |
| | | LHNHYTQKSLSLSPGKGGSHHHHHH | |
| | Hole: | EVQLVESGGGLVQPGGSLRLSCAASGENIKDTYIHWVRQAPGKGLEWVARIYPTNGY | 3 |
| | | TRYADSVKGRFTISADTSKNTAYLQMNSLRAEDTAVYYCSRWGGDGFYAMDYWGQGT | |
| | | LVTVSSASTKGPSVFPLAPSSKSTSGGTAALGCLVKDYFPEPVTVSWNSGALTSGVH | |
| | | TFPAVLQSSGLYSLSSVVTVPSSSLGTQTYICNVNHKPSNTKVDKKVEPKSCDKTHT | |
| | | CPPCPAPELLGGPSVFLFPPKPKDTLMISRTPEVTCVVVDVSHEDPEVKENWYVDGV | |
| | | EVHNAKTKPREEQYGSTYRVVSVLTVLHQDWLNGKEYKCKVSNKALPAPIEKTISKA | |
| | | KGQPREPQVYTLPPSRDELTKNQVSLSCAVKGFYPSDIAVEWESNGQPENNYKTTPP | |
| | | VLDSDGSFFLVSKLTVDKSRWQQGNVFSCSVMHEALHNHYTQKSLSLSPGKGGSGAW | |
| | | SHPQFEK | |
| | L: | DIQMTQSPSSLSASVGDRVTITCRASQDVNTAVAWYQQKPGKAPKLLIYSASFLYSG | 4 |
| | | VPSRFSGSRSGTDFTLTISSLQPEDFATYYCQQHYTTPPTFGQGTKLEIKRTVAAPS | |
| | | VFIFPPSDEQLKSGTASVVCLLNNFYPREAKVQWKVDNALQSGNSQESVTEQDSKDS | |
| | | TYSLSSTLTLSKADYEKHKVYACEVTHQGLSSPVTKSFNRGEC | |
| CXCL12- | Knob: | KPVSLSYRCPCRFFESHVARANVKHLKILNTPNCALQIVARLKNNNRQVCIDPKLKW | 1 |
| Cetuximab | | IQEYLEKALNPWEPKSCDKTHTCPPCPAPELLGGPSVFLFPPKPKDTLMISRTPEVT | |
| | | CVVVDVSHEDPEVKFNWYVDGVEVHNAKTKPREEQYGSTYRVVSVLTVLHQDWLNGK | |
| | | EYKCKVSNKALPAPIEKTISKAKGQPREPQVYTLPPSRDELTKNQVSLWCLVKGFYP | |
| | | SDIAVEWESNGQPENNYKTTPPVLDSDGSFFLYSKLTVDKSRWQQGNVFSCSVMHEA | |
| | | LHNHYTQKSLSLSPGKGGSHHHHHH | |
| | Hole: | QVQLKQSGPGLVQPSQSLSITCTVSGFSLTNYGVHWVRQSPGKGLEWLGVIWSGGNT | 38 |
| | | DYNTPFTSRLSINKDNSKSQVFFKMNSLQSNDTAIYYCARALTYYDYEFAYWGQGTL | |
| | | VTVSAASTKGPSVFPLAPSSKSTSGGTAALGCLVKDYFPEPVTVSWNSGALTSGVHT | |
| | | FPAVLQSSGLYSLSSVVTVPSSSLGTQTYICNVNHKPSNTKVDKKVEPKSCDKTHTC | |
| | | PPCPAPELLGGPSVFLFPPKPKDTLMISRTPEVTCVVVDVSHEDPEVKENWYVDGVE | |
| | | VHNAKTKPREEQYGSTYRVVSVLTVLHQDWLNGKEYKCKVSNKALPAPIEKTISKAK | |
| | | GQPREPQVYTLPPSRDELTKNQVSLSCAVKGFYPSDIAVEWESNGQPENNYKTTPPV | |
| | | LDSDGSFFLVSKLTVDKSRWQQGNVFSCSVMHEALHNHYTQKSLSLSPGKGGSGAWS | |
| | | HPQFEK | |
| | L: | DILLTQSPVILSVSPGERVSFSCRASQSIGTNIHWYQQRTNGSPRLLIKYASESISG | 39 |
| | | IPSRFSGSGSGTDFTLSINSVESEDIADYYCQQNNNWPTTFGAGTKLELKRTVAAPS | |
| | | VFIFPPSDEQLKSGTASVVCLLNNFYPREAKVQWKVDNALQSGNSQESVTEQDSKDS | |
| | | TYSLSSTLTLSKADYEKHKVYACEVTHQGLSSPVTKSENRGEC | |
| CXCL12- | Knob: | KPVSLSYRCPCRFFESHVARANVKHLKILNTPNCALQIVARLKNNNRQVCIDPKLKW | 1 |
| 4A06 | | IQEYLEKALNPWEPKSCDKTHTCPPCPAPELLGGPSVFLFPPKPKDTLMISRTPEVT | |
| | | CVVVDVSHEDPEVKFNWYVDGVEVHNAKTKPREEQYGSTYRVVSVLTVLHQDWLNGK | |
| | | EYKCKVSNKALPAPIEKTISKAKGQPREPQVYTLPPSRDELTKNQVSLWCLVKGFYP | |
| | | SDIAVEWESNGQPENNYKTTPPVLDSDGSFFLYSKLTVDKSRWQQGNVFSCSVMHEA | |
| | | LHNHYTQKSLSLSPGKGGSHHHHHH | |
| | Hole: | EISEVQLVESGGGLVQPGGSLRLSCAASGENLSYYYIHWVRQAPGKGLEWVASIYSS | 5 |
| | | SSYTSYADSVKGRFTISADTSKNTAYLQMNSLRAEDTAVYYCARAYYGFDYWGQGTL | |
| | | VTVSSASTKGPSVFPLAPSSKSTSGGTAALGCLVKDYFPEPVTVSWNSGALTSGVHT | |
| | | FPAVLQSSGLYSLSSVVTVPSSSLGTQTYICNVNHKPSNTKVDKKVEPKSCDKTHTC | |
| | | PPCPAPELLGGPSVFLFPPKPKDTLMISRTPEVTCVVVDVSHEDPEVKENWYVDGVE | |
| | | VHNAKTKPREEQYNSTYRVVSVLTVLHQDWLNGKEYKCKVSNKALPAPIEKTISKAK | |
| | | GQPREPQVYTLPPIRELMTSNQVSLSCAVKGFYPSDIAVEWESNGQPENNYKTTPPV | |
| | | LDSDGSFFLVSKLTVDKSRWQQGNVFSCSVMHEALHN | |
| | | HYTQKSLSLSPGK | |
| | L: | DIQMTQSPSSLSASVGDRVTITCRASQSVSSAVAWYQQKPGKAPKLLIYSASSLYSG | 37 |
| | | VPSRFSGSRSGTDFTLTISSLQPEDFATYYCQQSYYYYPITFGQGTKVEIKRTVAAP | |
| | | SVFIFPPSDSQLKSGTASVVCLLNNFYPREAKVQWKVDNALQSGNSQESVTEQDSKD | |
| | | STYSLSSTLTLSKADYEKHKVYACEVTHQGLSSPVTKSFNRGECGGSDYKDDDDK | |
| CXCL12- | Knob: | KPVSLSYRCPCRFFESHVARANVKHLKILNTPNCALQIVARLKNNNRQVCIDPKLKW | 1 |
| Isotype | | IQEYLEKALNPWEPKSCDKTHTCPPCPAPELLGGPSVFLFPPKPKDTLMISRTPEVT | |
| | | CVVVDVSHEDPEVKFNWYVDGVEVHNAKTKPREEQYGSTYRVVSVLTVLHQDWLNGK | |
| | | EYKCKVSNKALPAPIEKTISKAKGQPREPQVYTLPPSRDELTKNQVSLWCLVKGFYP | |
| | | SDIAVEWESNGQPENNYKTTPPVLDSDGSFFLYSKLTVDKSRWQQGNVFSCSVMHEA | |
| | | LHNHYTQKSLSLSPGKGGSHHHHHH | |
| | Hole: | EVQLVESGGGLVQPGGSLRLSCAASGENISSSYMHWVRQAPGKGLEWVAYISSYYGS | 6 |
| | | TYYADSVKGRFTISRDNSKNTLYLQMNSLRAEDTAVYYCARYYSAYPRGFDYWGQGT | |
| | | LVTVSSASTKGPSVFPLAPSSKSTSGGTAALGCLVKDYFPEPVTVSWNSGALTSGVH | |
| | | TFPAVLQSSGLYSLSSVVTVPSSSLGTQTYICNVNHKPSNTKVDKKVEPKSCDKTHT | |
| | | CPPCPAPELLGGPSVFLFPPKPKDTLMISRTPEVTCVVVDVSHEDPEVKENWYVDGV | |
| | | EVHNAKTKPREEQYGSTYRVVSVLTVLHQDWLNGKEYKCKVSNKALPAPIEKTISKA | |
| | | KGQPREPQVYTLPPSRDELTKNQVSLSCAVKGFYPSDIAVEWESNGQPENNYKTTPP | |
| | | VLDSDGSFFLVSKLTVDKSRWQQGNVFSCSVMHEALHNHYTQKSLSLSPGKGGSGAW | |
| | | SHPQFEK | |
| | L: | DIQMTQSPSSLSASVGDRVTITCRASQSVGSALAWYQQKPGKAPKLLIYSASSLYSG | 7 |
| | | VPSRFSGSRSGTDFTLTISSLQPEDFATYYCQQSSYHHPITFGQGTKVEIKRTVAAP | |
| | | SVFIFPPSDSQLKSGTASVVCLLNNFYPREAKVQWKVDNALQSGNSQESVTEQDSKD | |
| | | STYSLSSTLTLSKADYEKHKVYACEVTHQGLSSPVTKSF | |
| CXCL12 | Knob: | VSLSYRCPCRFFESHVARANVKHLKILNTPNCALQIVARLKNNNRQVCIDPKLKWIQ | 8 |
| (AKP)- | | EYLEKALNPWEPKSCDKTHTCPPCPAPELLGGPSVFLFPPKPKDTLMISRTPEVTCV | |
| Tecentriq | | VVDVSHEDPEVKFNWYVDGVEVHNAKTKPREEQYGSTYRVVSVLTVLHQDWLNGKEY | |
| | | KCKVSNKALPAPIEKTISKAKGQPREPQVYTLPPSRDELTKNQVSLWCLVKGFYPSD | |
| | | IAVEWESNGQPENNYKTTPPVLDSDGSFFLYSKLTVDKSRWQQGNVFSCSVMHEALH | |
| | | NHYTQKSLSLSPGKGGSHHHHHH | |
| | Hole: | EVQLVESGGGLVQPGGSLRLSCAASGFTFSDSWIHWVRQAPGKGLEWVAWISPYGGS | 9 |
| | | TYYADSVKGRFTISADTSKNTAYLQMNSLRAEDTAVYYCARRHWPGGFDYWGQGTLV | |
| | | TVSSASTKGPSVFPLAPSSKSTSGGTAALGCLVKDYFPEPVTVSWNSGALTSGVHTF | |
| | | PAVLQSSGLYSLSSVVTVPSSSLGTQTYICNVNHKPSNTKVDKKVEPKSCEPKSCDK | |
| | | THTCPPCPAPELLGGPSVFLFPPKPKDTLMISRTPEVTCVVVDVSHEDPEVKENWYV | |
| | | DGVEVHNAKTKPREEQYGSTYRVVSVLTVLHQDWLNGKEYKCKVSNKALPAPIEKTI | |
| | | SKAKGQPREPQVYTLPPSRDELTKNQVSLSCAVKGFYPSDIAVEWESNGQPENNYKT | |
| | | TPPVLDSDGSFFLVSKLTVDKSRWQQGNVFSCSVMHEALHNHYTQKSLSLSPGKGGS | |
| | | GAWSHPQFEK | |
| | L: | DIQMTQSPSSLSASVGDRVTITCRASQDVSTAVAWYQQKPGKAPKLLIYSASFLYSG | 40 |
| | | VPSRFSGSGSGTDFTLTISSLQPEDFATYYCQQYLYHPATFGQGTKVEIKRTVAAPS | |
| | | VFIFPPSDEQLKSGTASVVCLLNNFYPREAKVQWKVDNALQSGNSQESVTEQDSKDS | |
| | | TYSLSSTLTLSKADYEKHKVYACEVTHQGLSSPVTKSENRGEC | |
| CXCL12 | Knob: | KPVSLSYECPCRFFESHVARANVKHLKILNTPNCALQIVARLKNNNRQVCIDPKLKW | 10 |
| (R8E)- | | IQEYLEKALNPWEPKSCDKTHTCPPCPAPELLGGPSVFLFPPKPKDTLMISRTPEVT | |
| Tecentriq | | CVVVDVSHEDPEVKFNWYVDGVEVHNAKTKPREEQYGSTYRVVSVLTVLHQDWLNGK | |
| | | EYKCKVSNKALPAPIEKTISKAKGQPREPQVYTLPPSRDELTKNQVSLWCLVKGFYP | |
| | | SDIAVEWESNGQPENNYKTTPPVLDSDGSFFLYSKLTVDKSRWQQGNVFSCSVMHEA | |
| | | LHNHYTQKSLSLSPGKGGSHHHHHH | |
| | Hole: | EVQLVESGGGLVQPGGSLRLSCAASGFTFSDSWIHWVRQAPGKGLEWVAWISPYGGS | 11 |
| | | TYYADSVKGRFTISADTSKNTAYLQMNSLRAEDTAVYYCARRHWPGGFDYWGQGTLV | |
| | | TVSSASTKGPSVFPLAPSSKSTSGGTAALGCLVKDYFPEPVTVSWNSGALTSGVHTF | |
| | | PAVLQSSGLYSLSSVVTVPSSSLGTQTYICNVNHKPSNTKVDKKVEPKSCEPKSCDK | |
| | | THTCPPCPAPELLGGPSVFLFPPKPKDTLMISRTPEVTCVVVDVSHEDPEVKENWYV | |
| | | DGVEVHNAKTKPREEQYGSTYRVVSVLTVLHQDWLNGKEYKCKVSNKALPAPIEKTI | |
| | | SKAKGQPREPQVYTLPPSRDELTKNQVSLSCAVKGFYPSDIAVEWESNGQPENNYKT | |
| | | TPPVLDSDGSFFLVSKLTVDKSRWQQGNVFSCSVMHEALHNHYTQKSLSLSPGKGGS | |
| | | GAWSHPQFEK | |
| | L: | DIQMTQSPSSLSASVGDRVTITCRASQDVSTAVAWYQQKPGKAPKLLIYSASFLYSG | 40 |
| | | VPSRFSGSGSGTDFTLTISSLQPEDFATYYCQQYLYHPATFGQGTKVEIKRTVAAPS | |
| | | VFIFPPSDEQLKSGTASVVCLLNNFYPREAKVQWKVDNALQSGNSQESVTEQDSKDS | |
| | | TYSLSSTLTLSKADYEKHKVYACEVTHQGLSSPVTKSENRGEC | |
| CXCL12 | Knob: | LSYRCPCRFFESHVARANVKHLKILNTPNCALQIVARLKNNNRQVCIDPKLKWIQEY | 12 |
| (AKPVS)- | | LEKALNPWEPKSCDKTHTCPPCPAPELLGGPSVFLFPPKPKDTLMISRTPEVTCVVV | |
| Tecentriq | | DVSHEDPEVKFNWYVDGVEVHNAKTKPREEQYGSTYRVVSVLTVLHQDWLNGKEYKC | |
| | | KVSNKALPAPIEKTISKAKGQPREPQVYTLPPSRDELTKNQVSLWCLVKGFYPSDIA | |
| | | VEWESNGQPENNYKTTPPVLDSDGSFFLYSKLTVDKSRWQQGNVFSCSVMHEALHNH | |
| | | YTQKSLSLSPGKGGSHHHHHH | |
| | Hole: | EVQLVESGGGLVQPGGSLRLSCAASGFTFSDSWIHWVRQAPGKGLEWVAWISPYGGS | 13 |
| | | TYYADSVKGRFTISADTSKNTAYLQMNSLRAEDTAVYYCARRHWPGGFDYWGQGTLV | |
| | | TVSSASTKGPSVFPLAPSSKSTSGGTAALGCLVKDYFPEPVTVSWNSGALTSGVHTF | |
| | | PAVLQSSGLYSLSSVVTVPSSSLGTQTYICNVNHKPSNTKVDKKVEPKSCEPKSCDK | |
| | | THTCPPCPAPELLGGPSVFLFPPKPKDTLMISRTPEVTCVVVDVSHEDPEVKENWYV | |
| | | DGVEVHNAKTKPREEQYGSTYRVVSVLTVLHQDWLNGKEYKCKVSNKALPAPIEKTI | |
| | | SKAKGQPREPQVYTLPPSRDELTKNQVSLSCAVKGFYPSDIAVEWESNGQPENNYKT | |
| | | TPPVLDSDGSFFLVSKLTVDKSRWQQGNVFSCSVMHEALHNHYTQKSLSLSPGKGGS | |
| | | GAWSHPQFEK | |
| | L: | DIQMTQSPSSLSASVGDRVTITCRASQDVSTAVAWYQQKPGKAPKLLIYSASFLYSG | 40 |
| | | VPSRFSGSGSGTDFTLTISSLQPEDFATYYCQQYLYHPATFGQGTKVEIKRTVAAPS | |
| | | VFIFPPSDEQLKSGTASVVCLLNNFYPREAKVQWKVDNALQSGNSQESVTEQDSKDS | |
| | | TYSLSSTLTLSKADYEKHKVYACEVTHQGLSSPVTKSENRGEC | |
| CXCL12- | Knob: | KPVSLSYRCPCRFFESHVARANVKHLKILNTPNCALQIVARLKNNNRQVCIDPKLKW | 1 |
| Tecentriq | | IQEYLEKALNPWEPKSCDKTHTCPPCPAPELLGGPSVFLFPPKPKDTLMISRTPEVT | |
| (HC S57A) | | CVVVDVSHEDPEVKFNWYVDGVEVHNAKTKPREEQYGSTYRVVSVLTVLHQDWLNGK | |
| | | EYKCKVSNKALPAPIEKTISKAKGQPREPQVYTLPPSRDELTKNQVSLWCLVKGFYP | |
| | | SDIAVEWESNGQPENNYKTTPPVLDSDGSFFLYSKLTVDKSRWQQGNVFSCSVMHEA | |
| | | LHNHYTQKSLSLSPGKGGSHHHHHH | |
| | Hole: | EVQLVESGGGLVQPGGSLRLSCAASGFTFSDSWIHWVRQAPGKGLEWVAWISPYGGA | 14 |
| | | TYYADSVKGRFTISADTSKNTAYLQMNSLRAEDTAVYYCARRHWPGGFDYWGQGTLV | |
| | | TVSSASTKGPSVFPLAPSSKSTSGGTAALGCLVKDYFPEPVTVSWNSGALTSGVHTF | |
| | | PAVLQSSGLYSLSSVVTVPSSSLGTQTYICNVNHKPSNTKVDKKVEPKSCEPKSCDK | |
| | | THTCPPCPAPELLGGPSVFLFPPKPKDTLMISRTPEVTCVVVDVSHEDPEVKENWYV | |
| | | DGVEVHNAKTKPREEQYGSTYRVVSVLTVLHQDWLNGKEYKCKVSNKALPAPIEKTI | |
| | | SKAKGQPREPQVYTLPPSRDELTKNQVSLSCAVKGFYPSDIAVEWESNGQPENNYKT | |
| | | TPPVLDSDGSFFLVSKLTVDKSRWQQGNVFSCSVMHEALHNHYTQKSLSLSPGKGGS | |
| | | GAWSHPQFEK | |
| | L: | DIQMTQSPSSLSASVGDRVTITCRASQDVSTAVAWYQQKPGKAPKLLIYSASFLYSG | 40 |
| | | VPSRFSGSGSGTDFTLTISSLQPEDFATYYCQQYLYHPATFGQGTKVEIKRTVAAPS | |
| | | VFIFPPSDEQLKSGTASVVCLLNNFYPREAKVQWKVDNALQSGNSQESVTEQDSKDS | |
| | | TYSLSSTLTLSKADYEKHKVYACEVTHQGLSSPVTKSENRGEC | |
| CXCL12- | Knob: | KPVSLSYRCPCRFFESHVARANVKHLKILNTPNCALQIVARLKNNNRQVCIDPKLKW | 1 |
| Tecentriq | | IQEYLEKALNPWEPKSCDKTHTCPPCPAPELLGGPSVFLFPPKPKDTLMISRTPEVT | |
| (HC D31A) | | CVVVDVSHEDPEVKFNWYVDGVEVHNAKTKPREEQYGSTYRVVSVLTVLHQDWLNGK | |
| | | EYKCKVSNKALPAPIEKTISKAKGQPREPQVYTLPPSRDELTKNQVSLWCLVKGFYP | |
| | | SDIAVEWESNGQPENNYKTTPPVLDSDGSFFLYSKLTVDKSRWQQGNVFSCSVMHEA | |
| | | LHNHYTQKSLSLSPGKGGSHHHHHH | |
| | Hole: | EVQLVESGGGLVQPGGSLRLSCAASGFTFSASWIHWVRQAPGKGLEWVAWISPYGGS | 15 |
| | | TYYADSVKGRFTISADTSKNTAYLQMNSLRAEDTAVYYCARRHWPGGFDYWGQGTLV | |
| | | TVSSASTKGPSVFPLAPSSKSTSGGTAALGCLVKDYFPEPVTVSWNSGALTSGVHTF | |
| | | PAVLQSSGLYSLSSVVTVPSSSLGTQTYICNVNHKPSNTKVDKKVEPKSCEPKSCDK | |
| | | THTCPPCPAPELLGGPSVFLFPPKPKDTLMISRTPEVTCVVVDVSHEDPEVKENWYV | |
| | | DGVEVHNAKTKPREEQYGSTYRVVSVLTVLHQDWLNGKEYKCKVSNKALPAPIEKTI | |
| | | SKAKGQPREPQVYTLPPSRDELTKNQVSLSCAVKGFYPSDIAVEWESNGQPENNYKT | |
| | | TPPVLDSDGSFFLVSKLTVDKSRWQQGNVFSCSVMHEALHNHYTQKSLSLSPGKGGS | |
| | | GAWSHPQFEK | |
| | L: | DIQMTQSPSSLSASVGDRVTITCRASQDVSTAVAWYQQKPGKAPKLLIYSASFLYSG | 40 |
| | | VPSRFSGSGSGTDFTLTISSLQPEDFATYYCQQYLYHPATFGQGTKVEIKRTVAAPS | |
| | | VFIFPPSDEQLKSGTASVVCLLNNFYPREAKVQWKVDNALQSGNSQESVTEQDSKDS | |
| | | TYSLSSTLTLSKADYEKHKVYACEVTHQGLSSPVTKSENRGEC | |
| CXCL12- | Knob: | KPVSLSYRCPCRFFESHVARANVKHLKILNTPNCALQIVARLKNNNRQVCIDPKLKW | 1 |
| Tecentriq | | IQEYLEKALNPWEPKSCDKTHTCPPCPAPELLGGPSVFLFPPKPKDTLMISRTPEVT | |
| (HC S30A) | | CVVVDVSHEDPEVKFNWYVDGVEVHNAKTKPREEQYGSTYRVVSVLTVLHQDWLNGK | |
| | | EYKCKVSNKALPAPIEKTISKAKGQPREPQVYTLPPSRDELTKNQVSLWCLVKGFYP | |
| | | SDIAVEWESNGQPENNYKTTPPVLDSDGSFFLYSKLTVDKSRWQQGNVFSCSVMHEA | |
| | | LHNHYTQKSLSLSPGKGGSHHHHHH | |
| | Hole: | EVQLVESGGGLVQPGGSLRLSCAASGFTFADSWIHWVRQAPGKGLEWVAWISPYGGS | 16 |
| | | TYYADSVKGRFTISADTSKNTAYLQMNSLRAEDTAVYYCARRHWPGGFDYWGQGTLV | |
| | | TVSSASTKGPSVFPLAPSSKSTSGGTAALGCLVKDYFPEPVTVSWNSGALTSGVHTE | |
| | | PAVLQSSGLYSLSSVVTVPSSSLGTQTYICNVNHKPSNTKVDKKVEPKSCEPKSCDK | |
| | | THTCPPCPAPELLGGPSVFLFPPKPKDTLMISRTPEVTCVVVDVSHEDPEVKENWYV | |
| | | DGVEVHNAKTKPREEQYGSTYRVVSVLTVLHQDWLNGKEYKCKVSNKALPAPIEKTI | |
| | | SKAKGQPREPQVYTLPPSRDELTKNQVSLSCAVKGFYPSDIAVEWESNGQPENNYKT | |
| | | TPPVLDSDGSFFLVSKLTVDKSRWQQGNVFSCSVMHEALHNHYTQKSLSLSPGKGGS | |
| | | GAWSHPQFEK | |
| | L: | DIQMTQSPSSLSASVGDRVTITCRASQDVSTAVAWYQQKPGKAPKLLIYSASFLYSG | 40 |
| | | VPSRFSGSGSGTDFTLTISSLQPEDFATYYCQQYLYHPATFGQGTKVEIKRTVAAPS | |
| | | VFIFPPSDEQLKSGTASVVCLLNNFYPREAKVQWKVDNALQSGNSQESVTEQDSKDS | |
| | | TYSLSSTLTLSKADYEKHKVYACEVTHQGLSSPVTKSENRGEC | |
| CXCL12- | Knob: | KPVSLSYRCPCRFFESHVARANVKHLKILNTPNCALQIVARLKNNNRQVCIDPKLKW | 1 |
| Tecentriq | | IQEYLEKALNPWEPKSCDKTHTCPPCPAPELLGGPSVFLFPPKPKDTLMISRTPEVT | |
| (HC W33A) | | CVVVDVSHEDPEVKFNWYVDGVEVHNAKTKPREEQYGSTYRVVSVLTVLHQDWLNGK | |
| | | EYKCKVSNKALPAPIEKTISKAKGQPREPQVYTLPPSRDELTKNQVSLWCLVKGFYP | |
| | | SDIAVEWESNGQPENNYKTTPPVLDSDGSFFLYSKLTVDKSRWQQGNVFSCSVMHEA | |
| | | LHNHYTQKSLSLSPGKGGSHHHHHH | |
| | Hole: | EVQLVESGGGLVQPGGSLRLSCAASGFTFSDSAIHWVRQAPGKGLEWVAWISPYGGS | 17 |
| | | TYYADSVKGRFTISADTSKNTAYLQMNSLRAEDTAVYYCARRHWPGGFDYWGQGTLV | |
| | | TVSSASTKGPSVFPLAPSSKSTSGGTAALGCLVKDYFPEPVTVSWNSGALTSGVHTF | |
| | | PAVLQSSGLYSLSSVVTVPSSSLGTQTYICNVNHKPSNTKVDKKVEPKSCEPKSCDK | |
| | | THTCPPCPAPELLGGPSVFLFPPKPKDTLMISRTPEVTCVVVDVSHEDPEVKENWYV | |
| | | DGVEVHNAKTKPREEQYGSTYRVVSVLTVLHQDWLNGKEYKCKVSNKALPAPIEKTI | |
| | | SKAKGQPREPQVYTLPPSRDELTKNQVSLSCAVKGFYPSDIAVEWESNGQPENNYKT | |
| | | TPPVLDSDGSFFLVSKLTVDKSRWQQGNVFSCSVMHEALHNHYTQKSLSLSPGKGGS | |
| | | GAWSHPQFEK | |
| | L: | DIQMTQSPSSLSASVGDRVTITCRASQDVSTAVAWYQQKPGKAPKLLIYSASFLYSG | 40 |
| | | VPSRFSGSGSGTDFTLTISSLQPEDFATYYCQQYLYHPATFGQGTKVEIKRTVAAPS | |
| | | VFIFPPSDEQLKSGTASVVCLLNNFYPREAKVQWKVDNALQSGNSQESVTEQDSKDS | |
| | | TYSLSSTLTLSKADYEKHKVYACEVTHQGLSSPVTKSFNRGEC | |
| CXCL12- | Knob: | KPVSLSYRCPCRFFESHVARANVKHLKILNTPNCALQIVARLKNNNRQVCIDPKLKW | 1 |
| Tecentriq | | IQEYLEKALNPWEPKSCDKTHTCPPCPAPELLGGPSVFLFPPKPKDTLMISRTPEVT | |
| (HC W50A) | | CVVVDVSHEDPEVKFNWYVDGVEVHNAKTKPREEQYGSTYRVVSVLTVLHQDWLNGK | |
| | | EYKCKVSNKALPAPIEKTISKAKGQPREPQVYTLPPSRDELTKNQVSLWCLVKGFYP | |
| | | SDIAVEWESNGQPENNYKTTPPVLDSDGSFFLYSKLTVDKSRWQQGNVFSCSVMHEA | |
| | | LHNHYTQKSLSLSPGKGGSHHHHHH | |
| | Hole: | EVQLVESGGGLVQPGGSLRLSCAASGFTFSDSWIHWVRQAPGKGLEWVAAISPYGGS | 18 |
| | | TYYADSVKGRFTISADTSKNTAYLQMNSLRAEDTAVYYCARRHWPGGFDYWGQGTLV | |
| | | TVSSASTKGPSVFPLAPSSKSTSGGTAALGCLVKDYFPEPVTVSWNSGALTSGVHTF | |
| | | PAVLQSSGLYSLSSVVTVPSSSLGTQTYICNVNHKPSNTKVDKKVEPKSCEPKSCDK | |
| | | THTCPPCPAPELLGGPSVFLFPPKPKDTLMISRTPEVTCVVVDVSHEDPEVKENWYV | |
| | | DGVEVHNAKTKPREEQYGSTYRVVSVLTVLHQDWLNGKEYKCKVSNKALPAPIEKTI | |
| | | SKAKGQPREPQVYTLPPSRDELTKNQVSLSCAVKGFYPSDIAVEWESNGQPENNYKT | |
| | | TPPVLDSDGSFFLVSKLTVDKSRWQQGNVFSCSVMHEALHNHYTQKSLSLSPGKGGS | |
| | | GAWSHPQFEK | |
| | L: | DIQMTQSPSSLSASVGDRVTITCRASQDVSTAVAWYQQKPGKAPKLLIYSASFLYSG | 40 |
| | | VPSRFSGSGSGTDFTLTISSLQPEDFATYYCQQYLYHPATFGQGTKVEIKRTVAAPS | |
| | | VFIFPPSDEQLKSGTASVVCLLNNFYPREAKVQWKVDNALQSGNSQESVTEQDSKDS | |
| | | TYSLSSTLTLSKADYEKHKVYACEVTHQGLSSPVTKSENRGEC | |
| CXCL12- | Knob: | KPVSLSYRCPCRFFESHVARANVKHLKILNTPNCALQIVARLKNNNRQVCIDPKLKW | 1 |
| Tecentriq | | IQEYLEKALNPWEPKSCDKTHTCPPCPAPELLGGPSVFLFPPKPKDTLMISRTPEVT | |
| (HC | | CVVVDVSHEDPEVKFNWYVDGVEVHNAKTKPREEQYGSTYRVVSVLTVLHQDWLNGK | |
| W101A) | | EYKCKVSNKALPAPIEKTISKAKGQPREPQVYTLPPSRDELTKNQVSLWCLVKGFYP | |
| | | SDIAVEWESNGQPENNYKTTPPVLDSDGSFFLYSKLTVDKSRWQQGNVFSCSVMHEA | |
| | | LHNHYTQKSLSLSPGKGGSHHHHHH | |
| | Hole: | EVQLVESGGGLVQPGGSLRLSCAASGFTFSDSWIHWVRQAPGKGLEWVAWISPYGGS | 19 |
| | | TYYADSVKGRFTISADTSKNTAYLQMNSLRAEDTAVYYCARRHAPGGFDYWGQGTLV | |
| | | TVSSASTKGPSVFPLAPSSKSTSGGTAALGCLVKDYFPEPVTVSWNSGALTSGVHTF | |
| | | PAVLQSSGLYSLSSVVTVPSSSLGTQTYICNVNHKPSNTKVDKKVEPKSCEPKSCDK | |
| | | THTCPPCPAPELLGGPSVFLFPPKPKDTLMISRTPEVTCVVVDVSHEDPEVKENWYV | |
| | | DGVEVHNAKTKPREEQYGSTYRVVSVLTVLHQDWLNGKEYKCKVSNKALPAPIEKTI | |
| | | SKAKGQPREPQVYTLPPSRDELTKNQVSLSCAVKGFYPSDIAVEWESNGQPENNYKT | |
| | | TPPVLDSDGSFFLVSKLTVDKSRWQQGNVFSCSVMHEALHNHYTQKSLSLSPGKGGS | |
| | | GAWSHPQFEK | |
| | L: | DIQMTQSPSSLSASVGDRVTITCRASQDVSTAVAWYQQKPGKAPKLLIYSASFLYSG | 40 |
| | | VPSRFSGSGSGTDFTLTISSLQPEDFATYYCQQYLYHPATFGQGTKVEIKRTVAAPS | |
| | | VFIFPPSDEQLKSGTASVVCLLNNFYPREAKVQWKVDNALQSGNSQESVTEQDSKDS | |
| | | TYSLSSTLTLSKADYEKHKVYACEVTHQGLSSPVTKSENRGEC | |
| CXCL12- | Knob: | KPVSLSYRCPCRFFESHVARANVKHLKILNTPNCALQIVARLKNNNRQVCIDPKLKW | 1 |
| Tecentriq | | IQEYLEKALNPWEPKSCDKTHTCPPCPAPELLGGPSVFLFPPKPKDTLMISRTPEVT | |
| (LC S30A) | | CVVVDVSHEDPEVKFNWYVDGVEVHNAKTKPREEQYGSTYRVVSVLTVLHQDWLNGK | |
| | | EYKCKVSNKALPAPIEKTISKAKGQPREPQVYTLPPSRDELTKNQVSLWCLVKGFYP | |
| | | SDIAVEWESNGQPENNYKTTPPVLDSDGSFFLYSKLTVDKSRWQQGNVFSCSVMHEA | |
| | | LHNHYTQKSLSLSPGKGGSHHHHHH | |
| | Hole: | EVQLVESGGGLVQPGGSLRLSCAASGFTFSDSWIHWVRQAPGKGLEWVAWISPYGGS | 20 |
| | | TYYADSVKGRFTISADTSKNTAYLQMNSLRAEDTAVYYCARRHWPGGFDYWGQGTLV | |
| | | TVSSASTKGPSVFPLAPSSKSTSGGTAALGCLVKDYFPEPVTVSWNSGALTSGVHTF | |
| | | PAVLQSSGLYSLSSVVTVPSSSLGTQTYICNVNHKPSNTKVDKKVEPKSCEPKSCDK | |
| | | THTCPPCPAPELLGGPSVFLFPPKPKDTLMISRTPEVTCVVVDVSHEDPEVKENWYV | |
| | | DGVEVHNAKTKPREEQYGSTYRVVSVLTVLHQDWLNGKEYKCKVSNKALPAPIEKTI | |
| | | SKAKGQPREPQVYTLPPSRDELTKNQVSLSCAVKGFYPSDIAVEWESNGQPENNYKT | |
| | | TPPVLDSDGSFFLVSKLTVDKSRWQQGNVFSCSVMHEALHNHYTQKSLSLSPGKGGS | |
| | | GAWSHPQFEK | |
| | L: | DIQMTQSPSSLSASVGDRVTITCRASQDVATAVAWYQQKPGKAPKLLIYSASFLYSG | 21 |
| | | VPSRFSGSGSGTDFTLTISSLQPEDFATYYCQQYLYHPATFGQGTKVEIKRTVAAPS | |
| | | VFIFPPSDEQLKSGTASVVCLLNNFYPREAKVQWKVDNALQSGNSQESVTEQDSKDS | |
| | | TYSLSSTLTLSKADYEKHKVYACEVTHQGLSSPVTKSENRGEC | |
| CXCL12- | Knob: | KPVSLSYRCPCRFFESHVARANVKHLKILNTPNCALQIVARLKNNNRQVCIDPKLKW | 1 |
| Tecentriq | | IQEYLEKALNPWEPKSCDKTHTCPPCPAPELLGGPSVFLFPPKPKDTLMISRTPEVT | |
| (LC Y93A) | | CVVVDVSHEDPEVKFNWYVDGVEVHNAKTKPREEQYGSTYRVVSVLTVLHQDWLNGK | |
| | | EYKCKVSNKALPAPIEKTISKAKGQPREPQVYTLPPSRDELTKNQVSLWCLVKGFYP | |
| | | SDIAVEWESNGQPENNYKTTPPVLDSDGSFFLYSKLTVDKSRWQQGNVFSCSVMHEA | |
| | | LHNHYTQKSLSLSPGKGGSHHHHHH | |
| | Hole: | EVQLVESGGGLVQPGGSLRLSCAASGFTFSDSWIHWVRQAPGKGLEWVAWISPYGGS | 22 |
| | | TYYADSVKGRFTISADTSKNTAYLQMNSLRAEDTAVYYCARRHWPGGFDYWGQGTLV | |
| | | TVSSASTKGPSVFPLAPSSKSTSGGTAALGCLVKDYFPEPVTVSWNSGALTSGVHTF | |
| | | PAVLQSSGLYSLSSVVTVPSSSLGTQTYICNVNHKPSNTKVDKKVEPKSCEPKSCDK | |
| | | THTCPPCPAPELLGGPSVFLFPPKPKDTLMISRTPEVTCVVVDVSHEDPEVKENWYV | |
| | | DGVEVHNAKTKPREEQYGSTYRVVSVLTVLHQDWLNGKEYKCKVSNKALPAPIEKTI | |
| | | SKAKGQPREPQVYTLPPSRDELTKNQVSLSCAVKGFYPSDIAVEWESNGQPENNYKT | |
| | | TPPVLDSDGSFFLVSKLTVDKSRWQQGNVFSCSVMHEALHNHYTQKSLSLSPGKGGS | |
| | | GAWSHPQFEK | |
| | L: | DIQMTQSPSSLSASVGDRVTITCRASQDVSTAVAWYQQKPGKAPKLLIYSASFLYSG | 23 |
| | | VPSRFSGSGSGTDFTLTISSLQPEDFATYYCQQYLAHPATFGQGTKVEIKRTVAAPS | |
| | | VFIFPPSDEQLKSGTASVVCLLNNFYPREAKVQWKVDNALQSGNSQESVTEQDSKDS | |
| | | TYSLSSTLTLSKADYEKHKVYACEVTHQGLSSPVTKSENRGEC | |
| CXCL12- | Knob: | KPVSLSYRCPCRFFESHVARANVKHLKILNTPNCALQIVARLKNNNRQVCIDPKLKW | 1 |
| Tecentriq | | IQEYLEKALNPWEPKSCDKTHTCPPCPAPELLGGPSVFLFPPKPKDTLMISRTPEVT | |
| (LC L92A) | | CVVVDVSHEDPEVKFNWYVDGVEVHNAKTKPREEQYGSTYRVVSVLTVLHQDWLNGK | |
| | | EYKCKVSNKALPAPIEKTISKAKGQPREPQVYTLPPSRDELTKNQVSLWCLVKGFYP | |
| | | SDIAVEWESNGQPENNYKTTPPVLDSDGSFFLYSKLTVDKSRWQQGNVFSCSVMHEA | |
| | | LHNHYTQKSLSLSPGKGGSHHHHHH | |
| | Hole: | EVQLVESGGGLVQPGGSLRLSCAASGFTFSDSWIHWVRQAPGKGLEWVAWISPYGGS | 24 |
| | | TYYADSVKGRFTISADTSKNTAYLQMNSLRAEDTAVYYCARRHWPGGFDYWGQGTLV | |
| | | TVSSASTKGPSVFPLAPSSKSTSGGTAALGCLVKDYFPEPVTVSWNSGALTSGVHTF | |
| | | PAVLQSSGLYSLSSVVTVPSSSLGTQTYICNVNHKPSNTKVDKKVEPKSCEPKSCDK | |
| | | THTCPPCPAPELLGGPSVFLFPPKPKDTLMISRTPEVTCVVVDVSHEDPEVKENWYV | |
| | | DGVEVHNAKTKPREEQYGSTYRVVSVLTVLHQDWLNGKEYKCKVSNKALPAPIEKTI | |
| | | SKAKGQPREPQVYTLPPSRDELTKNQVSLSCAVKGFYPSDIAVEWESNGQPENNYKT | |
| | | TPPVLDSDGSFFLVSKLTVDKSRWQQGNVFSCSVMHEALHNHYTQKSLSLSPGKGGS | |
| | | GAWSHPQFEK | |
| | L: | DIQMTQSPSSLSASVGDRVTITCRASQDVSTAVAWYQQKPGKAPKLLIYSASFLYSG | 25 |
| | | VPSRFSGSGSGTDFTLTISSLQPEDFATYYCQQYAYHPATFGQGTKVEIKRTVAAPS | |
| | | VFIFPPSDEQLKSGTASVVCLLNNFYPREAKVQWKVDNALQSGNSQESVTEQDSKDS | |
| | | TYSLSSTLTLSKADYEKHKVYACEVTHQGLSSPVTKSENRGEC | |
| CXCL12- | Knob: | KPVSLSYRCPCRFFESHVARANVKHLKILNTPNCALQIVARLKNNNRQVCIDPKLKW | 1 |
| BMS936559 | | IQEYLEKALNPWEPKSCDKTHTCPPCPAPELLGGPSVFLFPPKPKDTLMISRTPEVT | |
| | | CVVVDVSHEDPEVKFNWYVDGVEVHNAKTKPREEQYGSTYRVVSVLTVLHQDWLNGK | |
| | | EYKCKVSNKALPAPIEKTISKAKGQPREPQVYTLPPSRDELTKNQVSLWCLVKGFYP | |
| | | SDIAVEWESNGQPENNYKTTPPVLDSDGSFFLYSKLTVDKSRWQQGNVFSCSVMHEA | |
| | | LHNHYTQKSLSLSPGKGGSHHHHHH | |
| | Hole: | QVQLVQSGAEVKKPGSSVKVSCKTSGDTESTYAISWVRQAPGQGLEWMGGIIPIFGK | 26 |
| | | AHYAQKFQGRVTITADESTSTAYMELSSLRSEDTAVYFCARKFHFVSGSPFGMDVWG | |
| | | QGTTVTVSSASTKGPSVFPLAPSSKSTSGGTAALGCLVKDYFPEPVTVSWNSGALTS | |
| | | GVHTFPAVLQSSGLYSLSSVVTVPSSSLGTQTYICNVNHKPSNTKVDKKVEPKSCDK | |
| | | THTCPPCPAPELLGGPSVFLFPPKPKDTLMISRTPEVTCVVVDVSHEDPEVKENWYV | |
| | | DGVEVHNAKTKPREEQYGSTYRVVSVLTVLHQDWLNGKEYKCKVSNKALPAPIEKTI | |
| | | SKAKGQPREPQVYTLPPSRDELTKNQVSLSCAVKGFYPSDIAVEWESNGQPENNYKT | |
| | | TPPVLDSDGSFFLVSKLTVDKSRWQQGNVFSCSVMHEALHNHYTQKSLSLSPGKGGS | |
| | | GAWSHPQFEK | |
| | L: | EIVLTQSPATLSLSPGERATLSCRASQSVSSYLAWYQQKPGQAPRLLIYDASNRATG | 27 |
| | | IPARFSGSGSGTDFTLTISSLEPEDFAVYYCQQRSNWPTFGQGTKVEIKRTVAAPSV | |
| | | FIFPPSDEQLKSGTASVVCLLNNFYPREAKVQWKVDNALQSGNSQESVTEQDSKDST | |
| | | YSLSSTLTLSKADYEKHKVYACEVTHQGLSSPVTKSENRGEC | |
| CXCL12- | Knob: | KPVSLSYRCPCRFFESHVARANVKHLKILNTPNCALQIVARLKNNNRQVCIDPKLKW | 28 |
| Tecentriq | | IQEYLEKALNPWEPKSCDKTHTCPPCPAPELLGGPSVFLFPPKPKDTLMISRTPEVT | |
| glycosylated | | CVVVDVSHEDPEVKFNWYVDGVEVHNAKTKPREEQYNSTYRVVSVLTVLHQDWLNGK | |
| | | EYKCKVSNKALPAPIEKTISKAKGQPREPQVYTLPPSRDELTKNQVSLWCLVKGFYP | |
| | | SDIAVEWESNGQPENNYKTTPPVLDSDGSFFLYSKLTVDKSRWQQGNVFSCSVMHEA | |
| | | LHNHYTQKSLSLSPGKGGSHHHHHH | |
| | Hole: | EVQLVESGGGLVQPGGSLRLSCAASGFNISSSYMHWVRQAPGKGLEWVAYISSYYGS | 29 |
| | | TYYADSVKGRFTISRDNSKNTLYLQMNSLRAEDTAVYYCARYYSAYPRGFDYWGQGT | |
| | | LVTVSSASTKGPSVFPLAPSSKSTSGGTAALGCLVKDYFPEPVTVSWNSGALTSGVH | |
| | | TFPAVLQSSGLYSLSSVVTVPSSSLGTQTYICNVNHKPSNTKVDKKVEPKSCDKTHT | |
| | | CPPCPAPELLGGPSVFLFPPKPKDTLMISRTPEVTCVVVDVSHEDPEVKENWYVDGV | |
| | | EVHNAKTKPREEQYNSTYRVVSVLTVLHQDWLNGKEYKCKVSNKALPAPIEKTISKA | |
| | | KGQPREPQVYTLPPSRDELTKNQVSLSCAVKGFYPSDIAVEWESNGQPENNYKTTPP | |
| | | VLDSDGSFFLVSKLTVDKSRWQQGNVFSCSVMHEALHNHYTQKSLSLSPGKGGSGAW | |
| | | SHPQFEK | |
| | L: | DIQMTQSPSSLSASVGDRVTITCRASQDVSTAVAWYQQKPGKAPKLLIYSASFLYSG | 40 |
| | | VPSRFSGSGSGTDFTLTISSLQPEDFATYYCQQYLYHPATFGQGTKVEIKRTVAAPS | |
| | | VFIFPPSDEQLKSGTASVVCLLNNFYPREAKVQWKVDNALQSGNSQESVTEQDSKDS | |
| | | TYSLSSTLTLSKADYEKHKVYACEVTHQGLSSPVTKSENRGEC | |
| CXCL12- | H: | KPVSLSYRCPCRFFESHVARANVKHLKILNTPNCALQIVARLKNNNRQVCIDPKLKW | 30 |
| avi- | | IQEYLEKALNKRFKMPWDKTHTGGSGSAGGLNDIFEAQKIEWHESSGSEVQLVESGG | |
| Tecentriq | | GLVQPGGSLRLSCAASGFTFSDSWIHWVRQAPGKGLEWVAWISPYGGSTYYADSVKG | |
| diabody | | RFTISADTSKNTAYLQMNSLRAEDTAVYYCARRHWPGGFDYWGQGTLVTVSSASTKG | |
| | | PSVFPLAPSSKSTSGGTAALGCLVKDYFPEPVTVSWNSGALTSGVHTFPAVLQSSGL | |
| | | YSLSSVVTVPSSSLGTQTYICNVNHKPSNTKVDKKVEPKSC | |
| | L: | DIQMTQSPSSLSASVGDRVTITCRASQDVSTAVAWYQQKPGKAPKLLIYSASFLYSG | 40 |
| | | VPSRFSGSGSGTDFTLTISSLQPEDFATYYCQQYLYHPATFGQGTKVEIKRTVAAPS | |
| | | VFIFPPSDEQLKSGTASVVCLLNNFYPREAKVQWKVDNALQSGNSQESVTEQDSKDS | |
| | | TYSLSSTLTLSKADYEKHKVYACEVTHQGLSSPVTKSENRGEC | |
| Trastuzumab | H: | EISEVQLVESGGGLVQPGGSLRLSCAASGFNIKDTYIHWVRQAPGKGLEWVARIYPT | 31 |
| Fab | | NGYTRYADSVKGRFTISADTSKNTAYLQMNSLRAEDTAVYYCSRWGGDGFYAMDYWG | |
| | | QGTLVTVSSASTKGPSVFPLAPSSKSTSGGTAALGCLVKDYFPEPVTVSWNSGALTS | |
| | | GVHTFPAVLQSSGLYSLSSVVTVPSSSLGTQTYICNVNHKPSNTKVDKKVDKTHTGG | |
| | | SGSAGGLNDIFEAQKIEWHE | |
| | L: | DIQMTQSPSSLSASVGDRVTITCRASQDVNTAVAWYQQKPGKAPKLLIYSASFLYSG | 4 |
| | | VPSRFSGSRSGTDFTLTISSLQPEDFATYYCQQHYTTPPTFGQGTKLEIKRTVAAPS | |
| | | VFIFPPSDEQLKSGTASVVCLLNNFYPREAKVQWKVDNALQSGNSQESVTEQDSKDS | |
| | | TYSLSSTLTLSKADYEKHKVYACEVTHQGLSSPVTKSENRGEC | |
| Trastuzumab | H: | EISEVQLVESGGGLVQPGGSLRLSCAASGENIKDTYIHWVRQAPGKGLEWVARIYPT | 32 |
| IgG | | NGYTRYADSVKGRFTISADTSKNTAYLQMNSLRAEDTAVYYCSRWGGDGFYAMDYWG | |
| | | QGTLVTVSSASTKGPSVFPLAPSSKSTSGGTAALGCLVKDYFPEPVTVSWNSGALTS | |
| | | GVHTFPAVLQSSGLYSLSSVVTVPSSSLGTQTYICNVNHKPSNTKVDKKVEPKSCDK | |
| | | THTCPPCPAPELLGGPSVFLFPPKPKDTLMISRTPEVTCVVVDVSHEDPEVKENWYV | |
| | | DGVEVHNAKTKPREEQYNSTYRVVSVLTVLHQDWLNGKEYKCKVSNKALPAPIEKTI | |
| | | SKAKGQPREPQVYTLPPSRDELTKNQVSLTCLVKGFYPSDIAVEWESNGQPENNYKT | |
| | | TPPVLDSDGSFFLYSKLTVDKSRWQQGNVFSCSVMHE | |
| | | ALHNHYTQKSLSLSPGK | |
| | L: | DIQMTQSPSSLSASVGDRVTITCRASQDVNTAVAWYQQKPGKAPKLLIYSASFLYSG | 4 |
| | | VPSRFSGSRSGTDFTLTISSLQPEDFATYYCQQHYTTPPTFGQGTKLEIKRTVAAPS | |
| | | VFIFPPSDEQLKSGTASVVCLLNNFYPREAKVQWKVDNALQSGNSQESVTEQDSKDS | |
| | | TYSLSSTLTLSKADYEKHKVYACEVTHQGLSSPVTKSENRGEC | |
| Tecentriq | H: | EVQLVESGGGLVQPGGSLRLSCAASGFTFSDSWIHWVRQAPGKGLEWVAWISPYGGS | 33 |
| Fab | | TYYADSVKGRFTISADTSKNTAYLQMNSLRAEDTAVYYCARRHWPGGFDYWGQGTLV | |
| | | TVSSASTKGPSVFPLAPSSKSTSGGTAALGCLVKDYFPEPVTVSWNSGALTSGVHTF | |
| | | PAVLQSSGLYSLSSVVTVPSSSLGTQTYICNVNHKPSNTKVDKKVDKTHTGGSGSAG | |
| | | GLNDIFEAQKIEWHE | |
| | L: | DIQMTQSPSSLSASVGDRVTITCRASQDVSTAVAWYQQKPGKAPKLLIYSASFLYSG | 40 |
| | | VPSRFSGSGSGTDFTLTISSLQPEDFATYYCQQYLYHPATFGQGTKVEIKRTVAAPS | |
| | | VFIFPPSDEQLKSGTASVVCLLNNFYPREAKVQWKVDNALQSGNSQESVTEQDSKDS | |
| | | TYSLSSTLTLSKADYEKHKVYACEVTHQGLSSPVTKSENRGEC | |
| Tecentriq- | Knob: | EVQLVESGGGLVQPGGSLRLSCAASGFRIYSYYSYIGWVRRAPGKGEELVARIYPSS | 34 |
| Isotype | | GYTYYADSVKGRFTISADTSKNTAYLQMNSLRAEDTAVYYCARWDFASPYYPGSSGL | |
| | | DYWGQGTLVTVSSEPKSCDKTHTCPPCPAPELLGGPSVFLFPPKPKDTLMISRTPEV | |
| | | TCVVVDVSHEDPEVKFNWYVDGVEVHNAKTKPREEQYGSTYRVVSVLTVLHQDWING | |
| | | KEYKCKVSNKALPAPIEKTISKAKGQPREPQVYTLPPSRDELTKNQVSLWCLVKGFY | |
| | | PSDIAVEWESNGQPENNYKTTPPVLDSDGSFFLYSKLTVDKSRWQQGNVFSCSVMHE | |
| | | ALHNHYTQKSLSLSPGKGGSHHHHHH | |
| | Hole: | EVQLVESGGGLVQPGGSLRLSCAASGFTFSDSWIHWVRQAPGKGLEWVAWISPYGGS | 35 |
| | | TYYADSVKGRFTISADTSKNTAYLQMNSLRAEDTAVYYCARRHWPGGFDYWGQGTLV | |
| | | TVSSASTKGPSVFPLAPSSKSTSGGTAALGCLVKDYFPEPVTVSWNSGALTSGVHTF | |
| | | PAVLQSSGLYSLSSVVTVPSSSLGTQTYICNVNHKPSNTKVDKKVEPKSCEPKSCDK | |
| | | THTCPPCPAPELLGGPSVFLFPPKPKDTLMISRTPEVTCVVVDVSHEDPEVKENWYV | |
| | | DGVEVHNAKTKPREEQYGSTYRVVSVLTVLHQDWLNGKEYKCKVSNKALPAPIEKTI | |
| | | SKAKGQPREPQVYTLPPSRDELTKNQVSLSCAVKGFYPSDIAVEWESNGQPENNYKT | |
| | | TPPVLDSDGSFFLVSKLTVDKSRWQQGNVFSCSVMHEALHNHYTQKSLSLSPGKGGS | |
| | | GAWSHPQFEK | |
| | L: | DIQMTQSPSSLSASVGDRVTITCRASQDVSTAVAWYQQKPGKAPKLLIYSASFLYSG | 40 |
| | | VPSRFSGSGSGTDFTLTISSLQPEDFATYYCQQYLYHPATFGQGTKVEIKRTVAAPS | |
| | | VFIFPPSDEQLKSGTASVVCLLNNFYPREAKVQWKVDNALQSGNSQESVTEQDSKDS | |
| | | TYSLSSTLTLSKADYEKHKVYACEVTHQGLSSPVTKSENRGEC | |
| 4A06 Fab | H: | EISEVQLVESGGGLVQPGGSLRLSCAASGENLSYYYIHWVRQAPGKGLEWVASIYSS | 36 |
| | | SSYTSYADSVKGRFTISADTSKNTAYLQMNSLRAEDTAVYYCARAYYGFDYWGQGTL | |
| | | VTVSSASTKGPSVFPLAPSSKSTSGGTAALGCLVKDYFPEPVTVSWNSGALTSGVHT | |
| | | FPAVLQSSGLYSLSSVVTVPSSSLGTQTYICNVNHKPSNTKVDKKVDKTHTGGSGSA | |
| | | GGLNDIFEAQKIEWHE | |
| | L: | DIQMTQSPSSLSASVGDRVTITCRASQSVSSAVAWYQQKPGKAPKLLIYSASSLYSG | 37 |
| | | VPSRFSGSRSGTDFTLTISSLQPEDFATYYCQQSYYYYPITFGQGTKVEIKRTVAAP | |
| | | SVFIFPPSDSQLKSGTASVVCLLNNFYPREAKVQWKVDNALQSGNSQESVTEQDSKD | |
| | | STYSLSSTLTLSKADYEKHKVYACEVTHQGLSSPVTKSFNRGECGGSDYKDDDDK | |

| Construct | | |
|---|---|---|
| Name | Construct Sequence | |
| CXCL12 | Knob: | 41 |
| (LGGG) | LGGGSLSYRCPCRFFESHVARANVKHLKILNTPNCALQIVARLKNNNRQVCIDPKLKWI | |
| Tecentriq | QEYLEKALNPWEPKSCDKTHTCPPCPAPELLGGPSVFLFPPKPKDTLMISRTPEVTCVV | |
| | VDVSHEDPEVKFNWYVDGVEVHNAKTKPREEQYGSTYRVVSVLTVLHQDWLNGKEYKCK | |
| | VSNKALPAPIEKTISKAKGQPREPQVYTLPPSRDELTKNQVSLWCLVKGFYPSDIAVEW | |
| | ESNGQPENNYKTTPPVLDSDGSFFLYSKLTVDKSRWQQGNVFSCSVMHEALHNHYTQKS | |
| | LSLSPGKGGSHHHHHH | |
| | Hole: | 42 |
| | EVQLVESGGGLVQPGGSLRLSCAASGFTFSDSWIHWVRQAPGKGLEWVAWISPYGGSTY | |
| | YADSVKGRFTISADTSKNTAYLQMNSLRAEDTAVYYCARRHWPGGFDYWGQGTLVTVSS | |
| | ASTKGPSVFPLAPSSKSTSGGTAALGCLVKDYFPEPVTVSWNSGALTSGVHTFPAVLQS | |
| | SGLYSLSSVVTVPSSSLGTQTYICNVNHKPSNTKVDKKVEPKSCEPKSCDKTHTCPPCP | |
| | APELLGGPSVFLFPPKPKDTLMISRTPEVTCVVVDVSHEDPEVKENWYVDGVEVHNAKT | |
| | KPREEQYGSTYRVVSVLTVLHQDWLNGKEYKCKVSNKALPAPIEKTISKAKGQPREPQV | |
| | YTLPPSRDELTKNQVSLSCAVKGFYPSDIAVEWESNGQPENNYKTTPPVLDSDGSFFLV | |
| | SKLTVDKSRWQQGNVFSCSVMHEALHNHYTQKSLSLSPGKGGSGAWSHPQFEK | |
| | L: | 43 |
| | DIQMTQSPSSLSASVGDRVTITCRASQDVSTAVAWYQQKPGKAPKLLIYSASFLYSGVP | |
| | SRFSGSGSGTDFTLTISSLQPEDFATYYCQQYLYHPATFGQGTKVEIKRTVAAPSVFIF | |
| | PPSDEQLKSGTASVVCLLNNFYPREAKVQWKVDNALQSGNSQESVTEQDSKDSTYSLSS | |
| | TLTLSKADYEKHKVYACEVTHQGLSSPVTKSENRGEC | |
| CXCL12 | Knob: | 44 |
| (K1R)- | RPVSLSYRCPCRFFESHVARANVKHLKILNTPNCALQIVARLKNNNRQVCIDPKLKWIQ | |
| Tecentriq | EYLEKALNPWEPKSCDKTHTCPPCPAPELLGGPSVFLFPPKPKDTLMISRTPEVTCVVV | |
| | DVSHEDPEVKFNWYVDGVEVHNAKTKPREEQYGSTYRVVSVLTVLHQDWLNGKEYKCKV | |
| | SNKALPAPIEKTISKAKGQPREPQVYTLPPSRDELTKNQVSLWCLVKGFYPSDIAVEWE | |
| | SNGQPENNYKTTPPVLDSDGSFFLYSKLTVDKSRWQQGNVFSCSVMHEALHNHYTQKSL | |
| | SLSPGKGGSHHHHHH | |
| | Hole: | 45 |
| | EVQLVESGGGLVQPGGSLRLSCAASGFTFSDSWIHWVRQAPGKGLEWVAWISPYGGSTY | |
| | YADSVKGRFTISADTSKNTAYLQMNSLRAEDTAVYYCARRHWPGGFDYWGQGTLVTVSS | |
| | ASTKGPSVFPLAPSSKSTSGGTAALGCLVKDYFPEPVTVSWNSGALTSGVHTFPAVLQS | |
| | SGLYSLSSVVTVPSSSLGTQTYICNVNHKPSNTKVDKKVEPKSCEPKSCDKTHTCPPCP | |
| | APELLGGPSVFLFPPKPKDTLMISRTPEVTCVVVDVSHEDPEVKFNWYVDGVEVHNAKT | |
| | KPREEQYGSTYRVVSVLTVLHQDWLNGKEYKCKVSNKALPAPIEKTISKAKGQPREPQV | |
| | YTLPPSRDELTKNQVSLSCAVKGFYPSDIAVEWESNGQPENNYKTTPPVLDSDGSFFLV | |
| | SKLTVDKSRWQQGNVFSCSVMHEALHNHYTQKSLSLSPGKGGSGAWSHPQFEK | |
| | L: | 70 |
| | DIQMTQSPSSLSASVGDRVTITCRASQDVSTAVAWYQQKPGKAPKLLIYSASFLYSGVP | |
| | SRFSGSGSGTDFTLTISSLQPEDFATYYCQQYLYHPATFGQGTKVEIKRTVAAPSVFIF | |
| | PPSDEQLKSGTASVVCLLNNFYPREAKVQWKVDNALQSGNSQESVTEQDSKDSTYSLSS | |
| | TLTLSKADYEKHKVYACEVTHQGLSSPVTKSENRGEC | |
| CXCL12 | Knob: | 47 |
| (P2G)- | KGVSLSYRCPCRFFESHVARANVKHLKILNTPNCALQIVARLKNNNRQVCIDPKLKWIQ | |
| Tecentriq | EYLEKALNPWEPKSCDKTHTCPPCPAPELLGGPSVFLFPPKPKDTLMISRTPEVTCVVV | |
| | DVSHEDPEVKFNWYVDGVEVHNAKTKPREEQYGSTYRVVSVLTVLHQDWLNGKEYKCKV | |
| | SNKALPAPIEKTISKAKGQPREPQVYTLPPSRDELTKNQVSLWCLVKGFYPSDIAVEWE | |
| | SNGQPENNYKTTPPVLDSDGSFFLYSKLTVDKSRWQQGNVFSCSVMHEALHNHYTQKSL | |
| | SLSPGKGGSHHHHHH | |
| | Hole: | 48 |
| | EVQLVESGGGLVQPGGSLRLSCAASGFTFSDSWIHWVRQAPGKGLEWVAWISPYGGSTY | |
| | YADSVKGRFTISADTSKNTAYLQMNSLRAEDTAVYYCARRHWPGGFDYWGQGTLVTVSS | |
| | ASTKGPSVFPLAPSSKSTSGGTAALGCLVKDYFPEPVTVSWNSGALTSGVHTFPAVLQS | |
| | SGLYSLSSVVTVPSSSLGTQTYICNVNHKPSNTKVDKKVEPKSCEPKSCDKTHTCPPCP | |
| | APELLGGPSVFLFPPKPKDTLMISRTPEVTCVVVDVSHEDPEVKENWYVDGVEVHNAKT | |
| | KPREEQYGSTYRVVSVLTVLHQDWLNGKEYKCKVSNKALPAPIEKTISKAKGQPREPQV | |
| | YTLPPSRDELTKNQVSLSCAVKGFYPSDIAVEWESNGQPENNYKTTPPVLDSDGSFFLV | |
| | SKLTVDKSRWQQGNVFSCSVMHEALHNHYTQKSLSLSPGKGGSGAWSHPQFEK | |
| | L: | 49 |
| | DIQMTQSPSSLSASVGDRVTITCRASQDVSTAVAWYQQKPGKAPKLLIYSASFLYSGVP | |
| | SRFSGSGSGTDFTLTISSLQPEDFATYYCQQYLYHPATFGQGTKVEIKRTVAAPSVFIF | |
| | PPSDEQLKSGTASVVCLLNNFYPREAKVQWKVDNALQSGNSQESVTEQDSKDSTYSLSS | |
| | TLTLSKADYEKHKVYACEVTHQGLSSPVTKSENRGEC | |
| CXCL12 | Knob: | 50 |
| (VPGA)- | VPGASLSYRCPCRFFESHVARANVKHLKILNTPNCALQIVARLKNNNRQVCIDPKLKWI | |
| Tecentriq | QEYLEKALNPWEPKSCDKTHTCPPCPAPELLGGPSVFLFPPKPKDTLMISRTPEVTCVV | |
| | VDVSHEDPEVKFNWYVDGVEVHNAKTKPREEQYGSTYRVVSVLTVLHQDWLNGKEYKCK | |
| | VSNKALPAPIEKTISKAKGQPREPQVYTLPPSRDELTKNQVSLWCLVKGFYPSDIAVEW | |
| | ESNGQPENNYKTTPPVLDSDGSFFLYSKLTVDKSRWQQGNVFSCSVMHEALHNHYTQKS | |
| | LSLSPGKGGSHHHHHH | |
| | Hole: | 51 |
| | EVQLVESGGGLVQPGGSLRLSCAASGFTFSDSWIHWVRQAPGKGLEWVAWISPYGGSTY | |
| | YADSVKGRFTISADTSKNTAYLQMNSLRAEDTAVYYCARRHWPGGFDYWGQGTLVTVSS | |
| | ASTKGPSVFPLAPSSKSTSGGTAALGCLVKDYFPEPVTVSWNSGALTSGVHTFPAVLQS | |
| | SGLYSLSSVVTVPSSSLGTQTYICNVNHKPSNTKVDKKVEPKSCEPKSCDKTHTCPPCP | |
| | APELLGGPSVFLFPPKPKDTLMISRTPEVTCVVVDVSHEDPEVKFNWYVDGVEVHNAKT | |
| | KPREEQYGSTYRVVSVLTVLHQDWLNGKEYKCKVSNKALPAPIEKTISKAKGQPREPQV | |
| | YTLPPSRDELTKNQVSLSCAVKGFYPSDIAVEWESNGQPENNYKTTPPVLDSDGSFFLV | |
| | SKLTVDKSRWQQGNVFSCSVMHEALHNHYTQKSLSLSPGKGGSGAWSHPQFEK | |
| | L: | 52 |
| | DIQMTQSPSSLSASVGDRVTITCRASQDVSTAVAWYQQKPGKAPKLLIYSASFLYSGVP | |
| | SRFSGSGSGTDFTLTISSLQPEDFATYYCQQYLYHPATFGQGTKVEIKRTVAAPSVFIF | |
| | PPSDEQLKSGTASVVCLLNNFYPREAKVQWKVDNALQSGNSQESVTEQDSKDSTYSLSS | |
| | TLTLSKADYEKHKVYACEVTHQGLSSPVTKSENRGEC | |
| CXCL12 | Knob: | 53 |
| (QWVA)- | QWVASLSYRCPCRFFESHVARANVKHLKILNTPNCALQIVARLKNNNRQVCIDPKLKWI | |
| Tecentriq | QEYLEKALNPWEPKSCDKTHTCPPCPAPELLGGPSVFLFPPKPKDTLMISRTPEVTCVV | |
| | VDVSHEDPEVKFNWYVDGVEVHNAKTKPREEQYGSTYRVVSVLTVLHQDWLNGKEYKCK | |
| | VSNKALPAPIEKTISKAKGQPREPQVYTLPPSRDELTKNQVSLWCLVKGFYPSDIAVEW | |
| | ESNGQPENNYKTTPPVLDSDGSFFLYSKLTVDKSRWQQGNVFSCSVMHEALHNHYTQKS | |
| | LSLSPGKGGSHHHHHH | |
| | Hole: | 54 |
| | EVQLVESGGGLVQPGGSLRLSCAASGFTFSDSWIHWVRQAPGKGLEWVAWISPYGGSTY | |
| | YADSVKGRFTISADTSKNTAYLQMNSLRAEDTAVYYCARRHWPGGFDYWGQGTLVTVSS | |
| | ASTKGPSVFPLAPSSKSTSGGTAALGCLVKDYFPEPVTVSWNSGALTSGVHTFPAVLQS | |
| | SGLYSLSSVVTVPSSSLGTQTYICNVNHKPSNTKVDKKVEPKSCEPKSCDKTHTCPPCP | |
| | APELLGGPSVFLFPPKPKDTLMISRTPEVTCVVVDVSHEDPEVKENWYVDGVEVHNAKT | |
| | KPREEQYGSTYRVVSVLTVLHQDWLNGKEYKCKVSNKALPAPIEKTISKAKGQPREPQV | |
| | YTLPPSRDELTKNQVSLSCAVKGFYPSDIAVEWESNGQPENNYKTTPPVLDSDGSFFLV | |
| | SKLTVDKSRWQQGNVFSCSVMHEALHNHYTQKSLSLSPGKGGSGAWSHPQFEK | |
| | L: | 55 |
| | DIQMTQSPSSLSASVGDRVTITCRASQDVSTAVAWYQQKPGKAPKLLIYSASFLYSGVP | |
| | SRFSGSGSGTDFTLTISSLQPEDFATYYCQQYLYHPATFGQGTKVEIKRTVAAPSVFIF | |
| | PPSDEQLKSGTASVVCLLNNFYPREAKVQWKVDNALQSGNSQESVTEQDSKDSTYSLSS | |
| | TLTLSKADYEKHKVYACEVTHQGLSSPVTKSENRGEC | |
| CXCL12 | Knob: | 56 |
| (SQSQ)- | SQSQSLSYRCPCRFFESHVARANVKHLKILNTPNCALQIVARLKNNNRQVCIDPKLKWI | |
| Tecentriq | QEYLEKALNPWEPKSCDKTHTCPPCPAPELLGGPSVFLFPPKPKDTLMISRTPEVTCVV | |
| | VDVSHEDPEVKFNWYVDGVEVHNAKTKPREEQYGSTYRVVSVLTVLHQDWLNGKEYKCK | |
| | VSNKALPAPIEKTISKAKGQPREPQVYTLPPSRDELTKNQVSLWCLVKGFYPSDIAVEW | |
| | ESNGQPENNYKTTPPVLDSDGSFFLYSKLTVDKSRWQQGNVFSCSVMHEALHNHYTQKS | |
| | LSLSPGKGGSHHHHHH | |
| | Hole: | 57 |
| | EVQLVESGGGLVQPGGSLRLSCAASGFTFSDSWIHWVRQAPGKGLEWVAWISPYGGSTY | |
| | YADSVKGRFTISADTSKNTAYLQMNSLRAEDTAVYYCARRHWPGGFDYWGQGTLVTVSS | |
| | ASTKGPSVFPLAPSSKSTSGGTAALGCLVKDYFPEPVTVSWNSGALTSGVHTFPAVLQS | |
| | SGLYSLSSVVTVPSSSLGTQTYICNVNHKPSNTKVDKKVEPKSCEPKSCDKTHTCPPCP | |
| | APELLGGPSVFLFPPKPKDTLMISRTPEVTCVVVDVSHEDPEVKFNWYVDGVEVHNAKT | |
| | KPREEQYGSTYRVVSVLTVLHQDWLNGKEYKCKVSNKALPAPIEKTISKAKGQPREPQV | |
| | YTLPPSRDELTKNQVSLSCAVKGFYPSDIAVEWESNGQPENNYKTTPPVLDSDGSFFLV | |
| | SKLTVDKSRWQQGNVFSCSVMHEALHNHYTQKSLSLSPGKGGSGAWSHPQFEK | |
| | L: | 58 |
| | DIQMTQSPSSLSASVGDRVTITCRASQDVSTAVAWYQQKPGKAPKLLIYSASFLYSGVP | |
| | SRFSGSGSGTDFTLTISSLQPEDFATYYCQQYLYHPATFGQGTKVEIKRTVAAPSVFIF | |
| | PPSDEQLKSGTASVVCLLNNFYPREAKVQWKVDNALQSGNSQESVTEQDSKDSTYSLSS | |
| | TLTLSKADYEKHKVYACEVTHQGLSSPVTKSENRGEC | |
| CXCL12- | Knob: | 59 |
| Nivolumab | KPVSLSYRCPCRFFESHVARANVKHLKILNTPNCALQIVARLKNNNRQVCIDPKLKWIQ | |
| | EYLEKALNPWEPKSCDKTHTCPPCPAPELLGGPSVFLFPPKPKDTLMISRTPEVTCVVV | |
| | DVSHEDPEVKFNWYVDGVEVHNAKTKPREEQYGSTYRVVSVLTVLHQDWLNGKEYKCKV | |
| | SNKALPAPIEKTISKAKGQPREPQVYTLPPSRDELTKNQVSLWCLVKGFYPSDIAVEWE | |
| | SNGQPENNYKTTPPVLDSDGSFFLYSKLTVDKSRWQQGNVFSCSVMHEALHNHYTQKSL | |
| | SLSPGKGGSHHHHHH | |
| | Hole: | 60 |
| | QVQLVESGGGVVQPGRSLRLDCKASGITFSNSGMHWVRQAPGKGLEWVAVIWYDGSKRY | |
| | YADSVKGRFTISRDNSKNTLFLQMNSLRAEDTAVYYCATNDDYWGQGTLVTVSSASTKG | |
| | PSVFPLAPSSKSTSGGTAALGCLVKDYFPEPVTVSWNSGALTSGVHTFPAVLQSSGLYS | |
| | LSSVVTVPSSSLGTQTYICNVNHKPSNTKVDKKVEPKSCEPKSCDKTHTCPPCPAPELL | |
| | GGPSVFLFPPKPKDTLMISRTPEVTCVVVDVSHEDPEVKENWYVDGVEVHNAKTKPREE | |
| | QYGSTYRVVSVLTVLHQDWLNGKEYKCKVSNKALPAPIEKTISKAKGQPREPQVYTLPP | |
| | SRDELTKNQVSLSCAVKGFYPSDIAVEWESNGQPENNYKTTPPVLDSDGSFFLVSKLTV | |
| | DKSRWQQGNVFSCSVMHEALHNHYTQKSLSLSPGKGGSGAWSHPQFEK | |
| | L: | 61 |
| | EIVLTQSPATLSLSPGERATLSCRASQSVSSYLAWYQQKPGQAPRLLIYDASNRATGIP | |
| | ARFSGSGSGTDFTLTISSLEPEDFAVYYCQQSSNWPRTFGQGTKVEIKRTVAAPSVFIF | |
| | PPSDEQLKSGTASVVCLLNNFYPREAKVQWKVDNALQSGNSQESVTEQDSKDSTYSLSS | |
| | TLTLSKADYEKHKVYACEVTHQGLSSPVTKSENRGEC | |
| IL2- | Knob: | 62 |
| Nivolumab | APTSSSTKKTQLQLEHLLLDLQMILNGINNYKNPKLTRMLTFKFYMPKKATELKHLQCL | |
| | EEELKPLEEVLNLAQSKNFHLRPRDLISNINVIVLELKGSETTFMCEYADETATIVEFL | |
| | NRWITFCQSIISTLTEPKSCDKTHTCPPCPAPELLGGPSVFLFPPKPKDTLMISRTPEV | |
| | TCVVVDVSHEDPEVKFNWYVDGVEVHNAKTKPREEQYGSTYRVVSVLTVLHQDWLNGKE | |
| | YKCKVSNKALPAPIEKTISKAKGQPREPQVYTLPPSRDELTKNQVSLWCLVKGFYPSDI | |
| | AVEWESNGQPENNYKTTPPVLDSDGSFFLYSKLTVDKSRWQQGNVFSCSVMHEALHNHY | |
| | TQKSLSLSPGKGGSHHHHHH | |
| | Hole: | 63 |
| | QVQLVESGGGVVQPGRSLRLDCKASGITFSNSGMHWVRQAPGKGLEWVAVIWYDGSKRY | |
| | YADSVKGRFTISRDNSKNTLFLQMNSLRAEDTAVYYCATNDDYWGQGTLVTVSSASTKG | |
| | PSVFPLAPSSKSTSGGTAALGCLVKDYFPEPVTVSWNSGALTSGVHTFPAVLQSSGLYS | |
| | LSSVVTVPSSSLGTQTYICNVNHKPSNTKVDKKVEPKSCEPKSCDKTHTCPPCPAPELL | |
| | GGPSVFLFPPKPKDTLMISRTPEVTCVVVDVSHEDPEVKFNWYVDGVEVHNAKTKPREE | |
| | QYGSTYRVVSVLTVLHQDWLNGKEYKCKVSNKALPAPIEKTISKAKGQPREPQVYTLPP | |
| | SRDELTKNQVSLSCAVKGFYPSDIAVEWESNGQPENNYKTTPPVLDSDGSFFLVSKLTV | |
| | DKSRWQQGNVFSCSVMHEALHNHYTQKSLSLSPGKGGSGAWSHPQFEK | |
| | L: | 64 |
| | EIVLTQSPATLSLSPGERATLSCRASQSVSSYLAWYQQKPGQAPRLLIYDASNRATGIP | |
| | ARFSGSGSGTDFTLTISSLEPEDFAVYYCQQSSNWPRTFGQGTKVEIKRTVAAPSVFIF | |
| | PPSDEQLKSGTASVVCLLNNFYPREAKVQWKVDNALQSGNSQESVTEQDSKDSTYSLSS | |
| | TLTLSKADYEKHKVYACEVTHQGLSSPVTKSENRGEC | |
| CXCL12- | Knob: | 65 |
| Necitumumab | KPVSLSYRCPCRFFESHVARANVKHLKILNTPNCALQIVARLKNNNRQVCIDPKLKWIQ | |
| | EYLEKALNPWEPKSCDKTHTCPPCPAPELLGGPSVFLFPPKPKDTLMISRTPEVTCVVV | |
| | DVSHEDPEVKFNWYVDGVEVHNAKTKPREEQYGSTYRVVSVLTVLHQDWLNGKEYKCKV | |
| | SNKALPAPIEKTISKAKGQPREPQVYTLPPSRDELTKNQVSLWCLVKGFYPSDIAVEWE | |
| | SNGQPENNYKTTPPVLDSDGSFFLYSKLTVDKSRWQQGNVFSCSVMHEALHNHYTQKSL | |
| | SLSPGKGGSHHHHHH | |
| | Hole: | 66 |
| | QVQLQESGPGLVKPSQTLSLTCTVSGGSISSGDYYWSWIRQPPGKGLEWIGYIYYSGST | |
| | DYNPSLKSRVTMSVDTSKNQFSLKVNSVTAADTAVYYCARVSIFGVGTFDYWGQGTLVT | |
| | VSSASTKGPSVLPLAPSSKSTSGGTAALGCLVKDYFPEPVTVSWNSGALTSGVHTFPAV | |
| | LQSSGLYSLSSVVTVPSSSLGTQTYICNVNHKPSNTKVDKKV | |
| | EPKSCDKTHTCPPCPAPELLGGPSVFLFPPKPKDTLMISRTPEVTCVVVDVSHEDPEVK | |
| | FNWYVDGVEVHNAKTKPREEQYNSTYRVVSVLTVLHQDWLNGKEYKCKVSNKALPAPIE | |
| | KTISKAKGQPREPQVYTLPPSRDELTKNQVSLSCAVKGFYPSDIAVEWESNGQPENNYK | |
| | TTPPVLDSDGSFFLVSKLTVDKSRWQQGNVFSCSVMHEALHNHYTQKSLSLSPGK | |
| | L: | 67 |
| | EIVMTQSPATLSLSPGERATLSCRASQSVSSYLAWYQQKPGQAPRLLIYDASNRATGIP | |
| | ARFSGSGSGTDFTLTISSLEPEDFAVYYCHQYGSTPLTFGGGTKAEIKRTVAAPSVFIF | |
| | PPSDEQLKSGTASVVCLLNNFYPREAKVQWKVDNALQSGNSQESVTEQDSKDSTYSLSS | |
| | TLTLSKADYEKHKVYACEVTHQGLSSPVTKSENRGEC | |
| CXCL12- | Knob: | 1000 |
| Panitumumab | KPVSLSYRCPCRFFESHVARANVKHLKILNTPNCALQIVARLKNNNRQVCIDPKLKWIQ | |
| | EYLEKALNPWEPKSCDKTHTCPPCPAPELLGGPSVFLFPPKPKDTLMISRTPEVTCVVV | |
| | DVSHEDPEVKFNWYVDGVEVHNAKTKPREEQYGSTYRVVSVLTVLHQDWLNGKEYKCKV | |
| | SNKALPAPIEKTISKAKGQPREPQVYTLPPSRDELTKNQVSLWCLVKGFYPSDIAVEWE | |
| | SNGQPENNYKTTPPVLDSDGSFFLYSKLTVDKSRWQQGNVFSCSVMHEALHNHYTQKSL | |
| | SLSPGKGGSHHHHHH | |
| | Hole: | 69 |
| | QVQLQESGPGLVKPSETLSLTCTVSGGSVSSGDYYWTWIRQSPGKGLEWIGHIYYSGNT | |
| | NYNPSLKSRLTISIDTSKTQFSLKLSSVTAADTAIYYCVRDRVTGAFDIWGQGTMVTVS | |
| | SASTKGPSVFPLAPCSRSTSESTAALGCLVKDYFPEPVTVSWNSGALTSGVHTFPAVLQ | |
| | SSGLYSLSSVVTVPSSSLGTQTYICNVNHKPSNTKVDKKVEPKSCDKTHTCPPCPAPEL | |
| | LGGPSVFLFPPKPKDTLMISRTPEVTCVVVDVSHEDPEVKENWYVDGVEVHNAKTKPRE | |
| | EQYNSTYRVVSVLTVLHQDWLNGKEYKCKVSNKALPAPIEKTISKAKGQPREPQVYTLP | |
| | PSRDELTKNQVSLSCAVKGFYPSDIAVEWESNGQPENNYKTTPPVLDSDGSFFLVSKLT | |
| | VDKSRWQQGNVFSCSVMHEALHNHYTQKSLSLSPGK | |
| | L: | |
| | DIQMTQSPSSLSASVGDRVTITCQASQDISNYLNWYQQKPGKAPKLLIYDASNLETGVP | |
| | SRFSGSGSGTDFTFTISSLQPEDIATYFCQHFDHLPLAFGGGTKVEIKRTVAAPSVFIF | |
| | PPSDEQLKSGTASVVCLLNNFYPREAKVQWKVDNALQSGNSQESVTEQDSKDSTYSLSS | |
| | TLTLSKADYEKHKVYACEVTHQGLSSPVTKSENRGEC | |
| CXCL12- | Knob: | 70 |
| Matuzumab | KPVSLSYRCPCRFFESHVARANVKHLKILNTPNCALQIVARLKNNNRQVCIDPKLKWIQ | |
| | EYLEKALNPWEPKSCDKTHTCPPCPAPELLGGPSVFLFPPKPKDTLMISRTPEVTCVVV | |
| | DVSHEDPEVKFNWYVDGVEVHNAKTKPREEQYGSTYRVVSVLTVLHQDWLNGKEYKCKV | |
| | SNKALPAPIEKTISKAKGQPREPQVYTLPPSRDELTKNQVSLWCLVKGFYPSDIAVEWE | |
| | SNGQPENNYKTTPPVLDSDGSFFLYSKLTVDKSRWQQGNVFSCSVMHEALHNHYTQKSL | |
| | SLSPGKGGSHHHHHH | |
| | Hole: | 71 |
| | QVQLVQSGAEVKKPGASVKVSCKASGYTFTSHWMHWVRQAPGQGLEWIGEFNPSNGRTN | |
| | YNEKFKSKATMTVDTSTNTAYMELSSLRSEDTAVYYCASRDYDYDGRYFDYWGQGTLVT | |
| | VSSASTKGPSVFPLAPSSKSTSGGTAALGCLVKDYFPEPVTVSWNSGALTSGVHTFPAV | |
| | LQSSGLYSLSSVVTVPSSSLGTQTYICNVNHKPSNTKVDKKVEPKSCDKTHTCPPCPAP | |
| | ELLGGPSVFLFPPKPKDTLMISRTPEVTCVVVDVSHEDPEVKFNWYVDGVEVHNAKTKP | |
| | REEQYNSTYRVVSVLTVLHQDWLNGKEYKCKVSNKALPAPIEKTISKAKGQPREPQVYT | |
| | LPPSRDELTKNQVSLSCAVKGFYPSDIAVEWESNGQPENNYKTTPPVLDSDGSFFLVSK | |
| | LTVDKSRWQQGNVFSCSVMHEALHNHYTQKSLSLSPGK | |
| | L: | 72 |
| | DIQMTQSPSSLSASVGDRVTITCSASSSVTYMYWYQQKPGKAPKLLIYDTSNLASGVPS | |
| | RFSGSGSGTDYTFTISSLQPEDIATYYCQQWSSHIFTFGQGTKVEIKRTVAAPSVFIFP | |
| | PSDEQLKSGTASVVCLLNNFYPREAKVQWKVDNALQSGNSQESVTEQDSKDSTYSLSST | |
| | LTLSKADYEKHKVYACEVTHQGLSSPVTKSENRGEC | |
| CXCL12- | Knob: | 73 |
| Nimotuzumab | KPVSLSYRCPCRFFESHVARANVKHLKILNTPNCALQIVARLKNNNRQVCIDPKLKWIQ | |
| | EYLEKALNPWEPKSCDKTHTCPPCPAPELLGGPSVFLFPPKPKDTLMISRTPEVTCVVV | |
| | DVSHEDPEVKFNWYVDGVEVHNAKTKPREEQYGSTYRVVSVLTVLHQDWLNGKEYKCKV | |
| | SNKALPAPIEKTISKAKGQPREPQVYTLPPSRDELTKNQVSLWCLVKGFYPSDIAVEWE | |
| | SNGQPENNYKTTPPVLDSDGSFFLYSKLTVDKSRWQQGNVFSCSVMHEALHNHYTQKSL | |
| | SLSPGKGGSHHHHHH | |
| | Hole: | 74 |
| | QVQLQQSGAEVKKPGSSVKVSCKASGYTFTNYYIYWVRQAPGQGLEWIGGINPTSGGSN | |
| | FNEKFKTRVTITVDESTNTAYMELSSLRSEDTAFYFCARQGLWFDSDGRGFDFWGQGST | |
| | VTVSSASTKGPSVFPLAPSSKSTSGGTAALGCLVKDYFPEPVTVSWNSGALTSGVHTFP | |
| | AVLQSSGLYSLSSVVTVPSSSLGTQTYICNVNHKPSNTKVDKKVEPKSCDKTHTCPPCP | |
| | APELLGGPSVFLFPPKPKDTLMISRTPEVTCVVVDVSHEDPEVKFNWYVDGVEVHNAKT | |
| | KPREEQYGSTYRVVSVLTVLHQDWLNGKEYKCKVSNKALPAPIEKTISKAKGQPREPQV | |
| | YTLPPSRDELTKNQVSLSCAVKGFYPSDIAVEWESNGQPENNYKTTPPVLDSDGSFFLV | |
| | SKLTVDKSRWQQGNVFSCSVMHEALHNHYTQKSLSLSPGKGGSGAWSHPQFEK | |
| | L: | 75 |
| | DIQMTQSPSSLSASVGDRVTITCRSSQNIVHSNGNTYLDWYQQTPGKAPKLLIYKVSNR | |
| | FSGVPSRFSGSGSGTDFTFTISSLQPEDIATYYCFQYSHVPWTFGQGTKLQITREVAAP | |
| | SVFIFPPSDEQLKSGTASVVCLLNNFYPREAKVQWKVDNALQSGNSQESVTEQDSKDST | |
| | YSLSSTLTLSKADYEKHKVYACEVTHQGLSSPVTKSFNRGECGGSDYKDDDDK | |
| CXCL12- | Knob: | 76 |
| Depatuxizumab | KPVSLSYRCPCRFFESHVARANVKHLKILNTPNCALQIVARLKNNNRQVCIDPKLKWIQ | |
| | EYLEKALNPWEPKSCDKTHTCPPCPAPELLGGPSVFLFPPKPKDTLMISRTPEVTCVVV | |
| | DVSHEDPEVKFNWYVDGVEVHNAKTKPREEQYGSTYRVVSVLTVLHQDWLNGKEYKCKV | |
| | SNKALPAPIEKTISKAKGQPREPQVYTLPPSRDELTKNQVSLWCLVKGFYPSDIAVEWE | |
| | SNGQPENNYKTTPPVLDSDGSFFLYSKLTVDKSRWQQGNVFSCSVMHEALHNHYTQKSL | |
| | SLSPGKGGSHHHHHH | |
| | Hole: | 77 |
| | QVQLQESGPGLVKPSQTLSLTCTVSGYSISSDFAWNWIRQPPGKGLEWMGYISYSGNTR | |
| | YQPSLKSRITISRDTSKNQFFLKLNSVTAADTATYYCVTAGRGFPYWGQGTLVTVSSAS | |
| | TKGPSVFPLAPSSKSTSGGTAALGCLVKDYFPEPVTVSWNSGALTSGVHTFPAVLQSSG | |
| | LYSLSSVVTVPSSSLGTQTYICNVNHKPSNTKVDKKVEPKSCDKTHTCPPCPAPELLGG | |
| | PSVFLFPPKPKDTLMISRTPEVTCVVVDVSHEDPEVKFNWYVDGVEVHNAKTKPREEQY | |
| | GSTYRVVSVLTVLHQDWLNGKEYKCKVSNKALPAPIEKTISKAKGQPREPQVYTLPPSR | |
| | DELTKNQVSLSCAVKGFYPSDIAVEWESNGQPENNYKTTPPVLDSDGSFFLVSKLTVDK | |
| | SRWQQGNVFSCSVMHEALHNHYTQKSLSLSPGKGGSGAWSHPQFEK | |
| | L: | 78 |
| | DIQMTQSPSSMSVSVGDRVTITCHSSQDINSNIGWLQQKPGKSFKGLIYHGTNLDDGVP | |
| | SRFSGSGSGTDYTLTISSLQPEDFATYYCVQYAQFPWTFGGGTKLEIKRTVAAPSVFIF | |
| | PPSDEQLKSGTASVVCLLNNFYPREAKVQWKVDNALQSGNSQESVTEQDSKDSTYSLSS | |
| | TLTLSKADYEKHKVYACEVTHQGLSSPVTKSFNRGECGGSDYKDDDDK | |
| CXCL11- | Knob: | 79 |
| Tecentriq | FPMFKRGRCLCIGPGVKAVKVADIEKASIMYPSNNCDKIEVIITLKENKGQRCLNPKSK | |
| | QARLIIKKVERKNFEPKSCDKTHTCPPCPAPELLGGPSVFLFPPKPKDTLMISRTPEVT | |
| | CVVVDVSHEDPEVKFNWYVDGVEVHNAKTKPREEQYGSTYRVVSVLTVLHQDWLNGKEY | |
| | KCKVSNKALPAPIEKTISKAKGQPREPQVYTLPPSRDELTKNQVSLWCLVKGFYPSDIA | |
| | VEWESNGQPENNYKTTPPVLDSDGSFFLYSKLTVDKSRWQQGNVFSCSVMHEALHNHYT | |
| | QKSLSLSPGKGGSHHHHHH | |
| | Hole: | 80 |
| | EVQLVESGGGLVQPGGSLRLSCAASGFTFSDSWIHWVRQAPGKGLEWVAWISPYGGSTY | |
| | YADSVKGRFTISADTSKNTAYLQMNSLRAEDTAVYYCARRHWPGGFDYWGQGTLVTVSS | |
| | ASTKGPSVFPLAPSSKSTSGGTAALGCLVKDYFPEPVTVSWNSGALTSGVHTFPAVLQS | |
| | SGLYSLSSVVTVPSSSLGTQTYICNVNHKPSNTKVDKKVEPKSCEPKSCDKTHTCPPCP | |
| | APELLGGPSVFLFPPKPKDTLMISRTPEVTCVVVDVSHEDPEVKFNWYVDGVEVHNAKT | |
| | KPREEQYGSTYRVVSVLTVLHQDWLNGKEYKCKVSNKALPAPIEKTISKAKGQPREPQV | |
| | YTLPPSRDELTKNQVSLSCAVKGFYPSDIAVEWESNGQPENNYKTTPPVLDSDGSFFLV | |
| | SKLTVDKSRWQQGNVFSCSVMHEALHNHYTQKSLSLSPGKGGSGAWSHPQFEK | |
| | L: | 81 |
| | DIQMTQSPSSLSASVGDRVTITCRASQDVSTAVAWYQQKPGKAPKLLIYSASFLYSGVP | |
| | SRFSGSGSGTDFTLTISSLQPEDFATYYCQQYLYHPATFGQGTKVEIKRTVAAPSVFIF | |
| | PPSDEQLKSGTASVVCLLNNFYPREAKVQWKVDNALQSGNSQESVTEQDSKDSTYSLSS | |
| | TLTLSKADYEKHKVYACEVTHQGLSSPVTKSENRGEC | |
| CXCL11- | Knob: | 82 |
| Cetuximab | FPMFKRGRCLCIGPGVKAVKVADIEKASIMYPSNNCDKIEVIITLKENKGQRCLNPKSK | |
| | QARLIIKKVERKNFEPKSCDKTHTCPPCPAPELLGGPSVFLFPPKPKDTLMISRTPEVT | |
| | CVVVDVSHEDPEVKFNWYVDGVEVHNAKTKPREEQYGSTYRVVSVLTVLHQDWLNGKEY | |
| | KCKVSNKALPAPIEKTISKAKGQPREPQVYTLPPSRDELTKNQVSLWCLVKGFYPSDIA | |
| | VEWESNGQPENNYKTTPPVLDSDGSFFLYSKLTVDKSRWQQGNVFSCSVMHEALHNHYT | |
| | QKSLSLSPGKGGSHHHHHH | |
| | Hole: | |
| | QVQLKQSGPGLVQPSQSLSITCTVSGFSLTNYGVHWVRQSPGKGLEWLGVIWSGGNTDY | |
| | NTPFTSRLSINKDNSKSQVFFKMNSLQSNDTAIYYCARALTYYDYEFAYWGQGTLVTVS | |
| | AASTKGPSVFPLAPSSKSTSGGTAALGCLVKDYFPEPVTVSWNSGALTSGVHTFPAVLQ | |
| | SSGLYSLSSVVTVPSSSLGTQTYICNVNHKPSNTKVDKKVEPK | |
| | SCDKTHTCPPCPAPELLGGPSVFLFPPKPKDTLMISRTPEVTCVVVDVSHEDPEVKENW | |
| | YVDGVEVHNAKTKPREEQYGSTYRVVSVLTVLHQDWLNGKEYKCKVSNKALPAPIEKTI | |
| | SKAKGQPREPQVYTLPPSRDELTKNQVSLSCAVKGFYPSDIAVEWESNGQPENNYKTTP | |
| | PVLDSDGSFFLVSKLTVDKSRWQQGNVFSCSVMHEALHNHYTQKSLSLSPGKGGSGAWS | |
| | HPQFEK | |
| | L: | |
| | DILLTQSPVILSVSPGERVSFSCRASQSIGTNIHWYQQRTNGSPRLLIKYASESISGIP | |
| | SRFSGSGSGTDFTLSINSVESEDIADYYCQQNNNWPTTFGAGTKLELKRTVAAPSVFIF | |
| | PPSDEQLKSGTASVVCLLNNFYPREAKVQWKVDNALQSGNSQESVTEQDSKDSTYSLSS | |
| | TLTLSKADYEKHKVYACEVTHQGLSSPVTKSENRGEC | |
| VMIPII- | Knob: | |
| Tecentriq | GDTLGASWHRPDKCCLGYQKRPLPQVLLSSWYPTSQLCSKPGVIFLTKRGRQVCADKSK | |
| | DWVKKLMQQLPVTAREPKSCDKTHTCPPCPAPELLGGPSVFLFPPKPKDTLMISRTPEV | |
| | TCVVVDVSHEDPEVKFNWYVDGVEVHNAKTKPREEQYGSTYRVVSVLTVLHQDWLNGKE | |
| | YKCKVSNKALPAPIEKTISKAKGQPREPQVYTLPPSRDELTKNQVSLWCLVKGFYPSDI | |
| | AVEWESNGQPENNYKTTPPVLDSDGSFFLYSKLTVDKSRWQQGNVFSCSVMHEALHNHY | |
| | TQKSLSLSPGKGGSHHHHHH | |
| | Hole: | |
| | EVQLVESGGGLVQPGGSLRLSCAASGFTFSDSWIHWVRQAPGKGLEWVAWISPYGGSTY | |
| | YADSVKGRFTISADTSKNTAYLQMNSLRAEDTAVYYCARRHWPGGFDYWGQGTLVTVSS | |
| | ASTKGPSVFPLAPSSKSTSGGTAALGCLVKDYFPEPVTVSWNSGALTSGVHTFPAVLQS | |
| | SGLYSLSSVVTVPSSSLGTQTYICNVNHKPSNTKVDKKVEPKSCEPKSCDKTHTCPPCP | |
| | APELLGGPSVFLFPPKPKDTLMISRTPEVTCVVVDVSHEDPEVKFNWYVDGVEVHNAKT | |
| | KPREEQYGSTYRVVSVLTVLHQDWLNGKEYKCKVSNKALPAPIEKTISKAKGQPREPQV | |
| | YTLPPSRDELTKNQVSLSCAVKGFYPSDIAVEWESNGQPENNYKTTPPVLDSDGSFFLV | |
| | SKLTVDKSRWQQGNVFSCSVMHEALHNHYTQKSLSLSPGKGGSGAWSHPQFEK | |
| | L: | |
| | DIQMTQSPSSLSASVGDRVTITCRASQDVSTAVAWYQQKPGKAPKLLIYSASFLYSGVP | |
| | SRFSGSGSGTDFTLTISSLQPEDFATYYCQQYLYHPATFGQGTKVEIKRTVAAPSVFIF | |
| | PPSDEQLKSGTASVVCLLNNFYPREAKVQWKVDNALQSGNSQESVTEQDSKDSTYSLSS | |
| | TLTLSKADYEKHKVYACEVTHQGLSSPVTKSENRGEC | |
| VMIPII- | Knob: | |
| Cetuximab | GDTLGASWHRPDKCCLGYQKRPLPQVLLSSWYPTSQLCSKPGVIFLTKRGRQVCADKSK | |
| | DWVKKLMQQLPVTAREPKSCDKTHTCPPCPAPELLGGPSVFLFPPKPKDTLMISRTPEV | |
| | TCVVVDVSHEDPEVKFNWYVDGVEVHNAKTKPREEQYGSTYRVVSVLTVLHQDWLNGKE | |
| | YKCKVSNKALPAPIEKTISKAKGQPREPQVYTLPPSRDELTKNQVSLWCLVKGFYPSDI | |
| | AVEWESNGQPENNYKTTPPVLDSDGSFFLYSKLTVDKSRWQQGNVFSCSVMHEALHNHY | |
| | TQKSLSLSPGKGGSHHHHHH | |
| | Hole: | |
| | QVQLKQSGPGLVQPSQSLSITCTVSGFSLTNYGVHWVRQSPGKGLEWLGVIWSGGNTDY | |
| | NTPFTSRLSINKDNSKSQVFFKMNSLQSNDTAIYYCARALTYYDYEFAYWGQGTLVTVS | |
| | AASTKGPSVFPLAPSSKSTSGGTAALGCLVKDYFPEPVTVSWNSGALTSGVHTFPAVLQ | |
| | SSGLYSLSSVVTVPSSSLGTQTYICNVNHKPSNTKVDKKVEPK | |
| | SCDKTHTCPPCPAPELLGGPSVFLFPPKPKDTLMISRTPEVTCVVVDVSHEDPEVKENW | |
| | YVDGVEVHNAKTKPREEQYGSTYRVVSVLTVLHQDWLNGKEYKCKVSNKALPAPIEKTI | |
| | SKAKGQPREPQVYTLPPSRDELTKNQVSLSCAVKGFYPSDIAVEWESNGQPENNYKTTP | |
| | PVLDSDGSFFLVSKLTVDKSRWQQGNVFSCSVMHEALHNHYTQKSLSLSPGKGGSGAWS | |
| | HPQFEK | |
| | L: | |
| | DILLTQSPVILSVSPGERVSFSCRASQSIGTNIHWYQQRTNGSPRLLIKYASESISGIP | |
| | SRFSGSGSGTDFTLSINSVESEDIADYYCQQNNNWPTTFGAGTKLELKRTVAAPSVFIF | |
| | PPSDEQLKSGTASVVCLLNNFYPREAKVQWKVDNALQSGNSQESVTEQDSKDSTYSLSS | |
| | TLTLSKADYEKHKVYACEVTHQGLSSPVTKSENRGEC | |
| CXCL12- | Knob: | |
| Pertuzumab | KPVSLSYRCPCRFFESHVARANVKHLKILNTPNCALQIVARLKNNNRQVCIDPKLKWIQ | |
| | EYLEKALNPWEPKSCDKTHTCPPCPAPELLGGPSVFLFPPKPKDTLMISRTPEVTCVVV | |
| | DVSHEDPEVKFNWYVDGVEVHNAKTKPREEQYGSTYRVVSVLTVLHQDWLNGKEYKCKV | |
| | SNKALPAPIEKTISKAKGQPREPQVYTLPPSRDELTKNQVSLWCLVKGFYPSDIAVEWE | |
| | SNGQPENNYKTTPPVLDSDGSFFLYSKLTVDKSRWQQGNVFSCSVMHEALHNHYTQKSL | |
| | SLSPGKGGSHHHHHH | |
| | Hole: | |
| | EVQLVESGGGLVQPGGSLRLSCAASGFTFTDYTMDWVRQAPGKGLEWVADVNPNSGGSI | |
| | YNQRFKGRFTLSVDRSKNTLYLQMNSLRAEDTAVYYCARNLGPSFYFDYWGQGTLVTVS | |
| | SASTKGPSVFPLAPSSKSTSGGTAALGCLVKDYFPEPVTVSWNSGALTSGVHTFPAVLQ | |
| | SSGLYSLSSVVTVPSSSLGTQTYICNVNHKPSNTKVDKKVEPKSCEPKSCDKTHTCPPC | |
| | PAPELLGGPSVFLFPPKPKDTLMISRTPEVTCVVVDVSHEDPEVKENWYVDGVEVHNAK | |
| | TKPREEQYGSTYRVVSVLTVLHQDWLNGKEYKCKVSNKALPAPIEKTISKAKGQPREPQ | |
| | VYTLPPSRDELTKNQVSLSCAVKGFYPSDIAVEWESNGQPENNYKTTPPVLDSDGSFEL | |
| | VSKLTVDKSRWQQGNVFSCSVMHEALHNHYTQKSLSLSPGKGGSGAWSHPQFEK | |
| | L: | |
| | DIQMTQSPSSLSASVGDRVTITCKASQDVSIGVAWYQQKPGKAPKLLIYSASYRYTGVP | |
| | SRFSGSGSGTDFTLTISSLQPEDFATYYCQQYYIYPYTFGQGTKVEIKRTVAAPSVFIF | |
| | PPSDEQLKSGTASVVCLLNNFYPREAKVQWKVDNALQSGNSQESVTEQDSKDSTYSLSS | |
| | TLTLSKADYEKHKVYACEVTHQGLSSPVTKSENRGEC | |
| CXCL12- | Knob: | |
| Bevacizumab | KPVSLSYRCPCRFFESHVARANVKHLKILNTPNCALQIVARLKNNNRQVCIDPKLKWIQ | |
| | EYLEKALNPWEPKSCDKTHTCPPCPAPELLGGPSVFLFPPKPKDTLMISRTPEVTCVVV | |
| | DVSHEDPEVKFNWYVDGVEVHNAKTKPREEQYGSTYRVVSVLTVLHQDWLNGKEYKCKV | |
| | SNKALPAPIEKTISKAKGQPREPQVYTLPPSRDELTKNQVSLWCLVKGFYPSDIAVEWE | |
| | SNGQPENNYKTTPPVLDSDGSFFLYSKLTVDKSRWQQGNVFSCSVMHEALHNHYTQKSL | |
| | SLSPGKGGSHHHHHH | |
| | Hole: | |
| | EVQLVESGGGLVQPGGSLRLSCAASGYTFTNYGMNWVRQAPGKGLEWVGWINTYTGEPT | |
| | YAADFKRRFTFSLDTSKSTAYLQMNSLRAEDTAVYYCAKYPHYYGSSHWYFDVWGQGTL | |
| | VTVSSASTKGPSVFPLAPSSKSTSGGTAALGCLVKDYFPEPVTVSWNSGALTSGVHTFP | |
| | AVLQSSGLYSLSSVVTVPSSSLGTQTYICNVNHKPSNTKVDKKVEPKSCDKTHTCPPCP | |
| | APELLGGPSVFLFPPKPKDTLMIS | |
| | RTPEVTCVVVDVSHEDPEVKFNWYVDGVEVHNAKTKPREEQYGSTYRVVSVLTVLHQDW | |
| | LNGKEYKCKVSNKALPAPIEKTISKAKGQPREPQVYTLPPSRDELTKNQVSLSCAVKGF | |
| | YPSDIAVEWESNGQPENNYKTTPPVLDSDGSFFLVSKLTVDKSRWQQGNVFSCSVMHEA | |
| | LHNHYTQKSLSLSPGKGGSGAWSHPQFEK | |
| | L: | |
| | ASDIQMTQSPSSLSASVGDRVTITCSASQDISNYLNWYQQKPGKAPKVLIYFTSSLHSG | |
| | VPSRFSGSGSGTDFTLTISSLQPEDFATYYCQQYSTVPWTFGQGTKVEIKRTVAAPSVE | |
| | IFPPSDEQLKSGTASVVCLLNNFYPREAKVQWKVDNALQSGNSQESVTEQDSKDSTYSL | |
| | SSTLTLSKADYEKHKVYACEVTHQGLSSPVTKSENRGEC | |
| CXCL12- | Knob: | |
| Adalimumab | KPVSLSYRCPCRFFESHVARANVKHLKILNTPNCALQIVARLKNNNRQVCIDPKLKWIQ | |
| | EYLEKALNPWEPKSCDKTHTCPPCPAPELLGGPSVFLFPPKPKDTLMISRTPEVTCVVV | |
| | DVSHEDPEVKFNWYVDGVEVHNAKTKPREEQYGSTYRVVSVLTVLHQDWLNGKEYKCKV | |
| | SNKALPAPIEKTISKAKGQPREPQVYTLPPSRDELTKNQVSLWCLVKGFYPSDIAVEWE | |
| | SNGQPENNYKTTPPVLDSDGSFFLYSKLTVDKSRWQQGNVFSCSVMHEALHNHYTQKSL | |
| | SLSPGKGGSHHHHHH | |
| | Hole: | |
| | EVQLVESGGGLVQPGRSLRLSCAASGFTFDDYAMHWVRQAPGKGLEWVSAITWNSGHID | |
| | YADSVEGRFTISRDNAKNSLYLQMNSLRAEDTAVYYCAKVSYLSTASSLDYWGQGTLVT | |
| | VSSASTKGPSVFPLAPSSKSTSGGTAALGCLVKDYFPEPVTVSWNSGALTSGVHTFPAV | |
| | LQSSGLYSLSSVVTVPSSSLGTQTYICNVNHKPSNTKVDKKVEPKSCDKTHTCPPCPAP | |
| | ELLGGPSVFLFPPKPKDTLMISRTPEVTCVVVDVSHEDPEVKENWYVDGVEVHNAKTKP | |
| | REEQYGSTYRVVSVLTVLHQDWLNGKEYKCKVSNKALPAPIEKTISKAKGQPREPQVYT | |
| | LPPSRDELTKNQVSLSCAVKGFYPSDIAVEWESNGQPENNYKTTPPVLDSDGSFFLVSK | |
| | LTVDKSRWQQGNVFSCSVMHEALHNHYTQKSLSLSPGKGGSGAWSHPQFEK | |
| | L: | |
| | DIQMTQSPSSLSASVGDRVTITCRASQGIRNYLAWYQQKPGKAPKLLIYAASTLQSGVP | |
| | SRFSGSGSGTDFTLTISSLQPEDVATYYCQRYNRAPYTFGQGTKVEIKRTVAAPSVFIF | |
| | PPSDEQLKSGTASVVCLLNNFYPREAKVQWKVDNALQSGNSQESVTEQDSKDSTYSLSS | |
| | TLTLSKADYEKHKVYACEVTHQGLSSPVTKSENRGEC | |
| CXCL12- | H: | |
| Tecentriq | KPVSLSYRCPCRFFESHVARANVKHLKILNTPNCALQIVARLKNNNRQVCIDPKLKWIQ | |
| IgG HC | EYLEKALNKRFKMPWDKTHTGGSGSAGGLNDIFEAQKIEWHESSNSEVQLVESGGGLVQ | |
| Fusion | PGGSLRLSCAASGFTFSDSWIHWVRQAPGKGLEWVAWISPYGGSTYYADSVKGRFTISA | |
| | DTSKNTAYLQMNSLRAEDTAVYYCARRHWPGGFDYWGQGTLVTVSSASTKGPSVFPLAP | |
| | SSKSTSGGTAALGCLVKDYFPEPVTVSWNSGALTSGVHTFPAVLQSSGLYSLSSVVTVP | |
| | SSSLGTQTYICNVNHKPSNTKVDKKVEPKSCEPKSCDKTHTCPPCPAPELLGGPSVFLF | |
| | PPKPKDTLMISRTPEVTCVVVDVSHEDPEVKFNWYVDGVEVHNAKTKPREEQYGSTYRV | |
| | VSVLTVLHQDWLNGKEYKCKVSNKALPAPIEKTISKAKGQPREPQVYTLPPSRDELTKN | |
| | QVSLSCAVKGFYPSDIAVEWESNGQPENNYKTTPPVLDSDGSFFLVSKLTVDKSRWQQG | |
| | NVFSCSVMHEALHNHYTQKSLSLSPGKGGSGAWSHPQFEK | |
| | L: | |
| | DIQMTQSPSSLSASVGDRVTITCRASQDVSTAVAWYQQKPGKAPKLLIYSASFLYSGVP | |
| | SRFSGSGSGTDFTLTISSLQPEDFATYYCQQYLYHPATFGQGTKVEIKRTVAAPSVFIF | |
| | PPSDEQLKSGTASVVCLLNNFYPREAKVQWKVDNALQSGNSQESVTEQDSKDSTYSLSS | |
| | TLTLSKADYEKHKVYACEVTHQGLSSPVTKSENRGEC | |
| CXCL12- | H: | |
| Tecentriq | EVQLVESGGGLVQPGGSLRLSCAASGFTFSDSWIHWVRQAPGKGLEWVAWISPYGGSTY | |
| IgG LC | YADSVKGRFTISADTSKNTAYLQMNSLRAEDTAVYYCARRHWPGGFDYWGQGTLVTVSS | |
| Fusion | ASTKGPSVFPLAPSSKSTSGGTAALGCLVKDYFPEPVTVSWNSGALTSGVHTFPAVLQS | |
| | SGLYSLSSVVTVPSSSLGTQTYICNVNHKPSNTKVDKKVEPKSCEPKSCDKTHTCPPCP | |
| | APELLGGPSVFLFPPKPKDTLMISRTPEVTCVVVDVSHEDPEVKENWYVDGVEVHNAKT | |
| | KPREEQYGSTYRVVSVLTVLHQDWLNGKEYKCKVSNKALPAPIEKTISKAKGQPREPQV | |
| | YTLPPSRDELTKNQVSLSCAVKGFYPSDIAVEWESNGQPENNYKTTPPVLDSDGSFFLV | |
| | SKLTVDKSRWQQGNVFSCSVMHEALHNHYTQKSLSLSPGKGGSGAWSHPQFEK | |
| | L: | |
| | KPVSLSYRCPCRFFESHVARANVKHLKILNTPNCALQIVARLKNNNRQVCIDPKLKWIQ | |
| | EYLEKALNKRFKMPWDKTHTGGSGSAGGLNDIFEAQKIEWHESSNSDIQMTQSPSSLSA | |
| | SVGDRVTITCRASQDVSTAVAWYQQKPGKAPKLLIYSASFLYSGVPSRFSGSGSGTDFT | |
| | LTISSLQPEDFATYYCQQYLYHPATFGQGTKVEIKRTVAAPSVFIFPPSDEQLKSGTAS | |
| | VVCLLNNFYPREAKVQWKVDNALQSGNSQESVTEQDSKDSTYSLSSTLTLSKADYEKHK | |
| | VYACEVTHQGLSSPVTKSENRGEC | |
| Pertuzumab | Knob: | |
| Isotype | EVQLVESGGGLVQPGGSLRLSCAASGFRIYSYYSYIGWVRRAPGKGEELVARIYPSSGY | |
| | TYYADSVKGRFTISADTSKNTAYLQMNSLRAEDTAVYYCARWDFASPYYPGSSGLDYWG | |
| | QGTLVTVSSEPKSCDKTHTCPPCPAPELLGGPSVFLFPPKPKDTLMISRTPEVTCVVVD | |
| | VSHEDPEVKFNWYVDGVEVHNAKTKPREEQYGSTYRVVSVLTVLHQDWLNGKEYKCKVS | |
| | NKALPAPIEKTISKAKGQPREPQVYTLPPSRDELTKNQVSLWCLVKGFYPSDIAVEWES | |
| | NGQPENNYKTTPPVLDSDGSFFLYSKLTVDKSRWQQGNVFSCSVMHEALHNHYTQKSLS | |
| | LSPGKGGSHHHHHH | |
| | Hole: | |
| | EVQLVESGGGLVQPGGSLRLSCAASGFTFTDYTMDWVRQAPGKGLEWVADVNPNSGGSI | |
| | YNQRFKGRFTLSVDRSKNTLYLQMNSLRAEDTAVYYCARNLGPSFYFDYWGQGTLVTVS | |
| | SASTKGPSVFPLAPSSKSTSGGTAALGCLVKDYFPEPVTVSWNSGALTSGVHTFPAVLQ | |
| | SSGLYSLSSVVTVPSSSLGTQTYICNVNHKPSNTKVDKKVEPKSCEPKSCDKTHTCPPC | |
| | PAPELLGGPSVFLFPPKPKDTLMISRTPEVTCVVVDVSHEDPEVKENWYVDGVEVHNAK | |
| | TKPREEQYGSTYRVVSVLTVLHQDWLNGKEYKCKVSNKALPAPIEKTISKAKGQPREPQ | |
| | VYTLPPSRDELTKNQVSLSCAVKGFYPSDIAVEWESNGQPENNYKTTPPVLDSDGSFFL | |
| | VSKLTVDKSRWQQGNVFSCSVMHEALHNHYTQKSLSLSPGKGGSGAWSHPQFEK | |
| | L: | |
| | DIQMTQSPSSLSASVGDRVTITCKASQDVSIGVAWYQQKPGKAPKLLIYSASYRYTGVP | |
| | SRFSGSGSGTDFTLTISSLQPEDFATYYCQQYYIYPYTFGQGTKVEIKRTVAAPSVFIF | |
| | PPSDEQLKSGTASVVCLLNNFYPREAKVQWKVDNALQSGNSQESVTEQDSKDSTYSLSS | |
| | TLTLSKADYEKHKVYACEVTHQGLSSPVTKSENRGEC | |
| Nivolumab | Knob: | |
| Isotype | EVQLVESGGGLVQPGGSLRLSCAASGFRIYSYYSYIGWVRRAPGKGEELVARIYPSSGY | |
| | TYYADSVKGRFTISADTSKNTAYLQMNSLRAEDTAVYYCARWDFASPYYPGSSGLDYWG | |
| | QGTLVTVSSEPKSCDKTHTCPPCPAPELLGGPSVFLFPPKPKDTLMISRTPEVTCVVVD | |
| | VSHEDPEVKFNWYVDGVEVHNAKTKPREEQYGSTYRVVSVLTVLHQDWLNGKEYKCKVS | |
| | NKALPAPIEKTISKAKGQPREPQVYTLPPSRDELTKNQVSLWCLVKGFYPSDIAVEWES | |
| | NGQPENNYKTTPPVLDSDGSFFLYSKLTVDKSRWQQGNVFSCSVMHEALHNHYTQKSLS | |
| | LSPGKGGSHHHHHH | |
| | Hole: | |
| | QVQLVESGGGVVQPGRSLRLDCKASGITFSNSGMHWVRQAPGKGLEWVAVIWYDGSKRY | |
| | YADSVKGRFTISRDNSKNTLFLQMNSLRAEDTAVYYCATNDDYWGQGTLVTVSSASTKG | |
| | PSVFPLAPSSKSTSGGTAALGCLVKDYFPEPVTVSWNSGALTSGVHTFPAVLQSSGLYS | |
| | LSSVVTVPSSSLGTQTYICNVNHKPSNTKVDKKVEPKSCEPKSCDKTHTCPPCPAPELL | |
| | GGPSVFLFPPKPKDTLMISRTPEVTCVVVDVSHEDPEVKFNWYVDGVEVHNAKTKPREE | |
| | QYGSTYRVVSVLTVLHQDWLNGKEYKCKVSNKALPAPIEKTISKAKGQPREPQVYTLPP | |
| | SRDELTKNQVSLSCAVKGFYPSDIAVEWESNGQPENNYKTTPPVLDSDGSFFLVSKLTV | |
| | DKSRWQQGNVFSCSVMHEALHNHYTQKSLSLSPGKGGSGAWSHPQFEK | |
| | L: | |
| | EIVLTQSPATLSLSPGERATLSCRASQSVSSYLAWYQQKPGQAPRLLIYDASNRATGIP | |
| | ARFSGSGSGTDFTLTISSLEPEDFAVYYCQQSSNWPRTFGQGTKVEIKRTVAAPSVFIF | |
| | PPSDEQLKSGTASVVCLLNNFYPREAKVQWKVDNALQSGNSQESVTEQDSKDSTYSLSS | |
| | TLTLSKADYEKHKVYACEVTHQGLSSPVTKSENRGEC | |
| Nimotuzumab | Knob: | |
| Isotype | EVQLVESGGGLVQPGGSLRLSCAASGFRIYSYYSYIGWVRRAPGKGEELVARIYPSSGY | |
| | TYYADSVKGRFTISADTSKNTAYLQMNSLRAEDTAVYYCARWDFASPYYPGSSGLDYWG | |
| | QGTLVTVSSEPKSCDKTHTCPPCPAPELLGGPSVFLFPPKPKDTLMISRTPEVTCVVVD | |
| | VSHEDPEVKFNWYVDGVEVHNAKTKPREEQYGSTYRVVSVLTVLHQDWLNGKEYKCKVS | |
| | NKALPAPIEKTISKAKGQPREPQVYTLPPSRDELTKNQVSLWCLVKGFYPSDIAVEWES | |
| | NGQPENNYKTTPPVLDSDGSFFLYSKLTVDKSRWQQGNVFSCSVMHEALHNHYTQKSLS | |
| | LSPGKGGSHHHHHH | |
| | Hole: | |
| | QVQLQQSGAEVKKPGSSVKVSCKASGYTFTNYYIYWVRQAPGQGLEWIGGINPTSGGSN | |
| | FNEKFKTRVTITVDESTNTAYMELSSLRSEDTAFYFCARQGLWFDSDGRGFDFWGQGST | |
| | VTVSSASTKGPSVFPLAPSSKSTSGGTAALGCLVKDYFPEPVTVSWNSGALTSGVHTFP | |
| | AVLQSSGLYSLSSVVTVPSSSLGTQTYICNVNHKPSNTKVDKKVEPKSCDKTHTCPPCP | |
| | APELLGGPSVFLFPPKPKDTLMISRTPEVTCVVVDVSHEDPEVKENWYVDGVEVHNAKT | |
| | KPREEQYGSTYRVVSVLTVLHQDWLNGKEYKCKVSNKALPAPIEKTISKAKGQPREPQV | |
| | YTLPPSRDELTKNQVSLSCAVKGFYPSDIAVEWESNGQPENNYKTTPPVLDSDGSFFLV | |
| | SKLTVDKSRWQQGNVFSCSVMHEALHNHYTQKSLSLSPGKGGSGAWSHPQFEK | |
| | L: | |
| | DIQMTQSPSSLSASVGDRVTITCRSSQNIVHSNGNTYLDWYQQTPGKAPKLLIYKVSNR | |
| | FSGVPSRFSGSGSGTDFTFTISSLQPEDIATYYCFQYSHVPWTFGQGTKLQITREVAAP | |
| | SVFIFPPSDEQLKSGTASVVCLLNNFYPREAKVQWKVDNALQSGNSQESVTEQDSKDST | |
| | YSLSSTLTLSKADYEKHKVYACEVTHQGLSSPVTKSFNRGECGGSDYKDDDDK | |
| Necitumumab | Knob: | |
| Isotype | EVQLVESGGGLVQPGGSLRLSCAASGFRIYSYYSYIGWVRRAPGKGEELVARIYPSSGY | |
| | TYYADSVKGRFTISADTSKNTAYLQMNSLRAEDTAVYYCARWDFASPYYPGSSGLDYWG | |
| | QGTLVTVSSEPKSCDKTHTCPPCPAPELLGGPSVFLFPPKPKDTLMISRTPEVTCVVVD | |
| | VSHEDPEVKFNWYVDGVEVHNAKTKPREEQYGSTYRVVSVLTVLHQDWLNGKEYKCKVS | |
| | NKALPAPIEKTISKAKGQPREPQVYTLPPSRDELTKNQVSLWCLVKGFYPSDIAVEWES | |
| | NGQPENNYKTTPPVLDSDGSFFLYSKLTVDKSRWQQGNVFSCSVMHEALHNHYTQKSLS | |
| | LSPGKGGSHHHHHH | |
| | Hole: | |
| | QVQLQESGPGLVKPSQTLSLTCTVSGGSISSGDYYWSWIRQPPGKGLEWIGYIYYSGST | |
| | DYNPSLKSRVTMSVDTSKNQFSLKVNSVTAADTAVYYCARVSIFGVGTFDYWGQGTLVT | |
| | VSSASTKGPSVLPLAPSSKSTSGGTAALGCLVKDYFPEPVTVSWNSGALTSGVHTFPAV | |
| | LQSSGLYSLSSVVTVPSSSLGTQTYICNVNHKPSNTKVDKKV | |
| | EPKSCDKTHTCPPCPAPELLGGPSVFLFPPKPKDTLMISRTPEVTCVVVDVSHEDPEVK | |
| | FNWYVDGVEVHNAKTKPREEQYNSTYRVVSVLTVLHQDWLNGKEYKCKVSNKALPAPIE | |
| | KTISKAKGQPREPQVYTLPPSRDELTKNQVSLSCAVKGFYPSDIAVEWESNGQPENNYK | |
| | TTPPVLDSDGSFFLVSKLTVDKSRWQQGNVFSCSVMHEALHNHYTQKSLSLSPGK | |
| | L: | |
| | EIVMTQSPATLSLSPGERATLSCRASQSVSSYLAWYQQKPGQAPRLLIYDASNRATGIP | |
| | ARFSGSGSGTDFTLTISSLEPEDFAVYYCHQYGSTPLTFGGGTKAEIKRTVAAPSVFIF | |
| | PPSDEQLKSGTASVVCLLNNFYPREAKVQWKVDNALQSGNSQESVTEQDSKDSTYSLSS | |
| | TLTLSKADYEKHKVYACEVTHQGLSSPVTKSENRGEC | |
| Matuzumab | Knob: | |
| Isotype | EVQLVESGGGLVQPGGSLRLSCAASGFRIYSYYSYIGWVRRAPGKGEELVARIYPSSGY | |
| | TYYADSVKGRFTISADTSKNTAYLQMNSLRAEDTAVYYCARWDFASPYYPGSSGLDYWG | |
| | QGTLVTVSSEPKSCDKTHTCPPCPAPELLGGPSVFLFPPKPKDTLMISRTPEVTCVVVD | |
| | VSHEDPEVKFNWYVDGVEVHNAKTKPREEQYGSTYRVVSVLTVLHQDWLNGKEYKCKVS | |
| | NKALPAPIEKTISKAKGQPREPQVYTLPPSRDELTKNQVSLWCLVKGFYPSDIAVEWES | |
| | NGQPENNYKTTPPVLDSDGSFFLYSKLTVDKSRWQQGNVFSCSVMHEALHNHYTQKSLS | |
| | LSPGKGGSHHHHHH | |
| | Hole: | |
| | QVQLVQSGAEVKKPGASVKVSCKASGYTFTSHWMHWVRQAPGQGLEWIGEFNPSNGRTN | |
| | YNEKFKSKATMTVDTSTNTAYMELSSLRSEDTAVYYCASRDYDYDGRYFDYWGQGTLVT | |
| | VSSASTKGPSVFPLAPSSKSTSGGTAALGCLVKDYFPEPVTVSWNSGALTSGVHTFPAV | |
| | LQSSGLYSLSSVVTVPSSSLGTQTYICNVNHKPSNTKVDKKVEPKSCDKTHTCPPCPAP | |
| | ELLGGPSVFLFPPKPKDTLMISRTPEVTCVVVDVSHEDPEVKENWYVDGVEVHNAKTKP | |
| | REEQYNSTYRVVSVLTVLHQDWLNGKEYKCKVSNKALPAPIEKTISKAKGQPREPQVYT | |
| | LPPSRDELTKNQVSLSCAVKGFYPSDIAVEWESNGQPENNYKTTPPVLDSDGSFFLVSK | |
| | LTVDKSRWQQGNVFSCSVMHEALHNHYTQKSLSLSPGK | |
| | L: | |
| | DIQMTQSPSSLSASVGDRVTITCSASSSVTYMYWYQQKPGKAPKLLIYDTSNLASGVPS | |
| | RFSGSGSGTDYTFTISSLQPEDIATYYCQQWSSHIFTFGQGTKVEIKRTVAAPSVFIFP | |
| | PSDEQLKSGTASVVCLLNNFYPREAKVQWKVDNALQSGNSQESVTEQDSKDSTYSLSST | |
| | LTLSKADYEKHKVYACEVTHQGLSSPVTKSENRGEC | |
| Depatuxizumab | Knob: | |
| Isotype | EVQLVESGGGLVQPGGSLRLSCAASGFRIYSYYSYIGWVRRAPGKGEELVARIYPSSGY | |
| | TYYADSVKGRFTISADTSKNTAYLQMNSLRAEDTAVYYCARWDFASPYYPGSSGLDYWG | |
| | QGTLVTVSSEPKSCDKTHTCPPCPAPELLGGPSVFLFPPKPKDTLMISRTPEVTCVVVD | |
| | VSHEDPEVKFNWYVDGVEVHNAKTKPREEQYGSTYRVVSVLTVLHQDWLNGKEYKCKVS | |
| | NKALPAPIEKTISKAKGQPREPQVYTLPPSRDELTKNQVSLWCLVKGFYPSDIAVEWES | |
| | NGQPENNYKTTPPVLDSDGSFFLYSKLTVDKSRWQQGNVFSCSVMHEALHNHYTQKSLS | |
| | LSPGKGGSHHHHHH | |
| | Hole: | |
| | QVQLQESGPGLVKPSQTLSLTCTVSGYSISSDFAWNWIRQPPGKGLEWMGYISYSGNTR | |
| | YQPSLKSRITISRDTSKNQFFLKLNSVTAADTATYYCVTAGRGFPYWGQGTLVTVSSAS | |
| | TKGPSVFPLAPSSKSTSGGTAALGCLVKDYFPEPVTVSWNSGALTSGVHTFPAVLQSSG | |
| | LYSLSSVVTVPSSSLGTQTYICNVNHKPSNTKVDKKVEPKSCDKTHTCPPCPAPELLGG | |
| | PSVFLFPPKPKDTLMISRTPEVTCVVVDVSHEDPEVKENWYVDGVEVHNAKTKPREEQY | |
| | GSTYRVVSVLTVLHQDWLNGKEYKCKVSNKALPAPIEKTISKAKGQPREPQVYTLPPSR | |
| | DELTKNQVSLSCAVKGFYPSDIAVEWESNGQPENNYKTTPPVLDSDGSFFLVSKLTVDK | |
| | SRWQQGNVFSCSVMHEALHNHYTQKSLSLSPGKGGSGAWSHPQFEK | |
| | L: | |
| | DIQMTQSPSSMSVSVGDRVTITCHSSQDINSNIGWLQQKPGKSFKGLIYHGTNLDDGVP | |
| | SRFSGSGSGTDYTLTISSLQPEDFATYYCVQYAQFPWTFGGGTKLEIKRTVAAPSVFIF | |
| | PPSDEQLKSGTASVVCLLNNFYPREAKVQWKVDNALQSGNSQESVTEQDSKDSTYSLSS | |
| | TLTLSKADYEKHKVYACEVTHQGLSSPVTKSFNRGECGGSDYKDDDDK | |
| Panitumumab | Knob: | |
| Isotype | EVQLVESGGGLVQPGGSLRLSCAASGFRIYSYYSYIGWVRRAPGKGEELVARIYPSSGY | |
| | TYYADSVKGRFTISADTSKNTAYLQMNSLRAEDTAVYYCARWDFASPYYPGSSGLDYWG | |
| | QGTLVTVSSEPKSCDKTHTCPPCPAPELLGGPSVFLFPPKPKDTLMISRTPEVTCVVVD | |
| | VSHEDPEVKFNWYVDGVEVHNAKTKPREEQYGSTYRVVSVLTVLHQDWLNGKEYKCKVS | |
| | NKALPAPIEKTISKAKGQPREPQVYTLPPSRDELTKNQVSLWCLVKGFYPSDIAVEWES | |
| | NGQPENNYKTTPPVLDSDGSFFLYSKLTVDKSRWQQGNVFSCSVMHEALHNHYTQKSLS | |
| | LSPGKGGSHHHHHH | |
| | Hole: | |
| | QVQLQESGPGLVKPSETLSLTCTVSGGSVSSGDYYWTWIRQSPGKGLEWIGHIYYSGNT | |
| | NYNPSLKSRLTISIDTSKTQFSLKLSSVTAADTAIYYCVRDRVTGAFDIWGQGTMVTVS | |
| | SASTKGPSVFPLAPCSRSTSESTAALGCLVKDYFPEPVTVSWNSGALTSGVHTFPAVLQ | |
| | SSGLYSLSSVVTVPSSSLGTQTYICNVNHKPSNTKVDKKVEPKSCDKTHTCPPCPAPEL | |
| | LGGPSVFLFPPKPKDTLMISRTPEVTCVVVDVSHEDPEVKENWYVDGVEVHNAKTKPRE | |
| | EQYNSTYRVVSVLTVLHQDWLNGKEYKCKVSNKALPAPIEKTISKAKGQPREPQVYTLP | |
| | PSRDELTKNQVSLSCAVKGFYPSDIAVEWESNGQPENNYKTTPPVLDSDGSFFLVSKLT | |
| | VDKSRWQQGNVFSCSVMHEALHNHYTQKSLSLSPGK | |
| | L: | |
| | DIQMTQSPSSLSASVGDRVTITCQASQDISNYLNWYQQKPGKAPKLLIYDASNLETGVP | |
| | SRFSGSGSGTDFTFTISSLQPEDIATYFCQHFDHLPLAFGGGTKVEIKRTVAAPSVFIF | |
| | PPSDEQLKSGTASVVCLLNNFYPREAKVQWKVDNALQSGNSQESVTEQDSKDSTYSLSS | |
| | TLTLSKADYEKHKVYACEVTHQGLSSPVTKSENRGEC | |
| Bevacizumab | Knob: | |
| Isotype | EVQLVESGGGLVQPGGSLRLSCAASGFRIYSYYSYIGWVRRAPGKGEELVARIYPSSGY | |
| | TYYADSVKGRFTISADTSKNTAYLQMNSLRAEDTAVYYCARWDFASPYYPGSSGLDYWG | |
| | QGTLVTVSSEPKSCDKTHTCPPCPAPELLGGPSVFLFPPKPKDTLMISRTPEVTCVVVD | |
| | VSHEDPEVKFNWYVDGVEVHNAKTKPREEQYGSTYRVVSVLTVLHQDWLNGKEYKCKVS | |
| | NKALPAPIEKTISKAKGQPREPQVYTLPPSRDELTKNQVSLWCLVKGFYPSDIAVEWES | |
| | NGQPENNYKTTPPVLDSDGSFFLYSKLTVDKSRWQQGNVFSCSVMHEALHNHYTQKSLS | |
| | LSPGKGGSHHHHHH | |
| | Hole: | |
| | EVQLVESGGGLVQPGGSLRLSCAASGYTFTNYGMNWVRQAPGKGLEWVGWINTYTGEPT | |
| | YAADFKRRFTFSLDTSKSTAYLQMNSLRAEDTAVYYCAKYPHYYGSSHWYFDVWGQGTL | |
| | VTVSSASTKGPSVFPLAPSSKSTSGGTAALGCLVKDYFPEPVTVSWNSGALTSGVHTFP | |
| | AVLQSSGLYSLSSVVTVPSSSLGTQTYICNVNHKPSNTKVDKKVEPKSCDKTHTCPPCP | |
| | APELLGGPSVFLFPPKPKDTLMIS | |
| | RTPEVTCVVVDVSHEDPEVKENWYVDGVEVHNAKTKPREEQYGSTYRVVSVLTVLHQDW | |
| | LNGKEYKCKVSNKALPAPIEKTISKAKGQPREPQVYTLPPSRDELTKNQVSLSCAVKGF | |
| | YPSDIAVEWESNGQPENNYKTTPPVLDSDGSFFLVSKLTVDKSRWQQGNVFSCSVMHEA | |
| | LHNHYTQKSLSLSPGKGGSGAWSHPQFEK | |
| | L: | |
| | ASDIQMTQSPSSLSASVGDRVTITCSASQDISNYLNWYQQKPGKAPKVLIYFTSSLHSG | |
| | VPSRFSGSGSGTDFTLTISSLQPEDFATYYCQQYSTVPWTFGQGTKVEIKRTVAAPSVE | |
| | IFPPSDEQLKSGTASVVCLLNNFYPREAKVQWKVDNALQSGNSQESVTEQDSKDSTYSL | |
| | SSTLTLSKADYEKHKVYACEVTHQGLSSPVTKSENRGEC | |
| Adalimumab | Knob: | |
| Isotype | EVQLVESGGGLVQPGGSLRLSCAASGFRIYSYYSYIGWVRRAPGKGEELVARIYPSSGY | |
| | TYYADSVKGRFTISADTSKNTAYLQMNSLRAEDTAVYYCARWDFASPYYPGSSGLDYWG | |
| | QGTLVTVSSEPKSCDKTHTCPPCPAPELLGGPSVFLFPPKPKDTLMISRTPEVTCVVVD | |
| | VSHEDPEVKFNWYVDGVEVHNAKTKPREEQYGSTYRVVSVLTVLHQDWLNGKEYKCKVS | |
| | NKALPAPIEKTISKAKGQPREPQVYTLPPSRDELTKNQVSLWCLVKGFYPSDIAVEWES | |
| | NGQPENNYKTTPPVLDSDGSFFLYSKLTVDKSRWQQGNVFSCSVMHEALHNHYTQKSLS | |
| | LSPGKGGSHHHHHH | |
| | Hole: | |
| | EVQLVESGGGLVQPGRSLRLSCAASGFTFDDYAMHWVRQAPGKGLEWVSAITWNSGHID | |
| | YADSVEGRFTISRDNAKNSLYLQMNSLRAEDTAVYYCAKVSYLSTASSLDYWGQGTLVT | |
| | VSSASTKGPSVFPLAPSSKSTSGGTAALGCLVKDYFPEPVTVSWNSGALTSGVHTFPAV | |
| | LQSSGLYSLSSVVTVPSSSLGTQTYICNVNHKPSNTKVDKKVEPKSCDKTHTCPPCPAP | |
| | ELLGGPSVFLFPPKPKDTLMISRTPEVTCVVVDVSHEDPEVKFNWYVDGVEVHNAKTKP | |
| | REEQYGSTYRVVSVLTVLHQDWLNGKEYKCKVSNKALPAPIEKTISKAKGQPREPQVYT | |
| | LPPSRDELTKNQVSLSCAVKGFYPSDIAVEWESNGQPENNYKTTPPVLDSDGSFFLVSK | |
| | LTVDKSRWQQGNVFSCSVMHEALHNHYTQKSLSLSPGKGGSGAWSHPQFEK | |
| | L: | |
| | DIQMTQSPSSLSASVGDRVTITCRASQGIRNYLAWYQQKPGKAPKLLIYAASTLQSGVP | |
| | SRFSGSGSGTDFTLTISSLQPEDVATYYCQRYNRAPYTFGQGTKVEIKRTVAAPSVFIF | |
| | PPSDEQLKSGTASVVCLLNNFYPREAKVQWKVDNALQSGNSQESVTEQDSKDSTYSLSS | |
| | TLTLSKADYEKHKVYACEVTHQGLSSPVTKSENRGEC | |

### Immunoconjugates

[0142] The present disclosure further comprises immunoconjugates comprising any of the bispecific binding agents disclosed herein. The term “immunoconjugate” or “conjugate” as used herein refers to a compound or a derivative thereof that is linked to a binding agent, such as the bispecific binding agents provided herein. The immunoconjugate of the present disclosure generally comprises a binding agent, such as the bispecific binding agents provided herein and a small molecule. In some embodiments, the immunoconjugate further comprises a linker.

[0143] A “linker” is any chemical moiety that is capable of linking a compound, for example, the small molecule disclosed herein, to a binding agent, such as the bispecific binding agents provided herein in a stable and covalent manner. Linkers can be susceptible to or be substantially resistant to acid-induced cleavage, light-induced cleavage, peptidase-induced cleavage, esterase-induced cleavage, and disulfide bond cleavage, at conditions under which the compound or the antibody remains active. Suitable linkers are well known in the art and include, for example, disulfide groups, thioether groups, acid labile groups, photolabile groups, peptidase labile groups and esterase labile groups. Linkers also include charged linkers, and hydrophilic forms thereof as described herein and known in the art. In certain embodiments, the linker is selected from the group consisting of a cleavable linker, a non-cleavable linker, a hydrophilic linker, and a dicarboxylic acid based linker. In an exemplary embodiment, the linker is a non-cleavable linker. In another exemplary embodiment, the linker is a spacer, such as PEG4. In other embodiments, the small molecule does not dissociate from the binding agent.

[0144] The small molecule encompassed by the present disclosure can be any small molecule one skilled in the art deems suitable for the use, for example, targeted degradation of a protein of interest. The small molecules can be conjugated to the binding agent, such as the bispecific binding agents provided herein by methods known in the art. Some exemplary conjugation methods include, without limitations, methionine using oxaziridine based reagents, cysteine labeling with a maleimide based reagent or disulfide exchange reagent, lysine reactive activated esters, utilizing incorporation of an unnatural amino acid containing a reactive handle for conjugation, and N-Terminal or C-terminal conjugation. Some methods use engineered amino acids, such as aldehydes, for reactive conjugation. Other methods include Tag based bioconjugation methods. It is understood that the present disclosure is not limited by the few examples listed here, and other commonly known conjugation methods can also be used in making the immunoconjugates disclosed herein.

### Nucleic Acid Molecules

[0145] In one aspect, some embodiments disclosed herein relate to nucleic acid molecules comprising nucleotide sequences encoding the bispecific binding agents of the disclosure, including expression cassettes, and expression vectors containing these nucleic acid molecules operably linked to heterologous nucleic acid sequences such as, for example, regulatory sequences which direct in vivo expression of the bispecific binding agents in a host cell. In some embodiments, the bispecific binding agent descaled herein is expressed from a single genetic construct.

[0146] Nucleic acid molecules of the present disclosure can be nucleic acid molecules of any length, including nucleic acid molecules that are generally between about 5 Kb and about 50 Kb, for example between about 5 Kb and about 40 Kb, between about 5 Kb and about 30 Kb, between about 5 Kb and about 20 Kb, or between about 10 Kb and about 50 Kb, for example between about 15 Kb to 30 Kb, between about 20 Kb and about 50 Kb, between about 20 Kb and about 40 Kb, about 5 Kb and about 25 Kb, or about 30 Kb and about 50 Kb.

[0147] In some embodiments, the nucleotide sequence is incorporated into an expression cassette or an expression vector. It will be understood that an expression cassette generally includes a construct of genetic material that contains coding sequences and enough regulatory information to direct proper transcription and/or translation of the coding sequences in a recipient cell, in vivo and/or ex vivo. Generally, the expression cassette may be inserted into a vector for targeting to a desired host cell or tissue and/or into an individual. Thus, in some embodiments, an expression cassette of the disclosure comprises a nucleotide sequence encoding a bispecific binding agent operably linked to expression control elements sufficient to guide expression of the cassette in vivo. In some embodiments, the expression control element comprises a promoter and/or an enhancer and optionally, any or a combination of other nucleic acid sequences capable of effecting transcription and/or translation of the coding sequence.

[0148] In some embodiments, the nucleotide sequence is incorporated into an expression vector. Vectors generally comprise a recombinant polynucleotide construct designed for transfer between host cells, which may be used for the purpose of transformation, i.e., the introduction of heterologous DNA into a host cell. As such, in some embodiments, the vector can be a replicon, such as a plasmid, phage, or cosmid, into which another DNA segment may be inserted so as to bring about the replication of the inserted segment. Expression vectors further include a promoter operably linked to the recombinant polynucleotide, such that the recombinant polynucleotide is expressed in appropriate cells, under appropriate conditions. In some embodiments, the expression vector is an integrating vector, which can integrate into host nucleic acids.

[0149] In some embodiments, the expression vector is a viral vector, which further includes virus-derived nucleic acid elements that typically facilitate transfer of the nucleic acid molecule or integration into the genome of a cell or to a viral particle that mediates nucleic acid transfer. Viral particles will typically include various viral components and sometimes also host cell components in addition to nucleic acid(s). The term viral vector may refer either to a virus or viral particle capable of transferring a nucleic acid into a cell or to the transferred nucleic acid itself. Viral vectors and transfer plasmids contain structural and/or functional genetic elements that are primarily derived from a virus. Retroviral vectors contain structural and functional genetic elements, or portions thereof, that are primarily derived from a retrovirus. Lentiviral vectors are viral vectors or plasmids containing structural and functional genetic elements, or portions thereof, including LTRs that are primarily derived from a lentivirus.

[0150] The nucleic acid sequences can be optimized for expression in the host cell of interest. For example, the G-C content of the sequence can be adjusted to levels average for a given cellular host, as calculated by reference to known genes expressed in the host cell. Methods for codon optimization are known in the art. Codon usages within the coding sequence of the proteins disclosed herein can be optimized to enhance expression in the host cell, such that about 1%, about 5%, about 10%, about 25%, about 50%, about 75%, or up to 100% of the codons within the coding sequence have been optimized for expression in a particular host cell.

[0151] Some embodiments disclosed herein relate to vectors or expression cassettes including a recombinant nucleic acid molecule encoding the proteins disclosed herein. The expression cassette generally contains coding sequences and sufficient regulatory information to direct proper transcription and/or translation of the coding sequences in a recipient cell, in vivo and/or ex vivo. The expression cassette may be inserted into a vector for targeting to a desired host cell and/or into an individual. An expression cassette can be inserted into a plasmid, cosmid, virus, autonomously replicating polynucleotide molecule, or bacteriophage, as a linear or circular, single-stranded or double-stranded, DNA or RNA polynucleotide, derived from any source, capable of genomic integration or autonomous replication, including a nucleic acid molecule where one or more nucleic acid sequences has been linked in a functionally operative manner, i.e., operably linked.

[0152] Also provided herein are vectors, plasmids, or viruses containing one or more of the nucleic acid molecules encoding any bispecific binding agent or engineered protein disclosed herein. The nucleic acid molecules can be contained within a vector that is capable of directing their expression in, for example, a cell that has been transformed/transduced with the vector. Suitable vectors for use in eukaryotic and prokaryotic cells are known in the art and are commercially available, or readily prepared by a skilled artisan. See for example, Sambrook, J., & Russell, D. W. (2012). Molecular Cloning: A Laboratory Manual (4th ed.). Cold Spring Harbor, NY: Cold Spring Harbor Laboratory and Sambrook, J., & Russel, D. W. (2001). Molecular Cloning: A Laboratory Manual (3rd ed.). Cold Spring Harbor, NY: Cold Spring Harbor Laboratory (jointly referred to herein as “Sambrook”); Ausubel, F. M. (1987). Current Protocols in Molecular Biology. New York, NY: Wiley (including supplements through 2014); Bollag, D. M. et al. (1996). Protein Methods. New York, NY: Wiley-Liss; Huang, L. et al. (2005). Nonviral Vectors for Gene Therapy. San Diego: Academic Press; Kaplitt, M. G. et al. (1995). Viral Vectors: Gene Therapy and Neuroscience Applications. San Diego, CA: Academic Press; Lefkovits, I. (1997). The Immunology Methods Manual: The Comprehensive Sourcebook of Techniques. San Diego, CA: Academic Press; Doyle, A. et al. (1998). Cell and Tissue Culture: Laboratory Procedures in Biotechnology. New York, NY: Wiley; Mullis, K. B., Ferré, F. & Gibbs, R. (1994). PCR: The Polymerase Chain Reaction. Boston: Birkhauser Publisher; Greenfield, E. A. (2014). Antibodies: A Laboratory Manual (2nd ed.). New York, NY: Cold Spring Harbor Laboratory Press; Beaucage, S. L. et al. (2000). Current Protocols in Nucleic Acid Chemistry. New York, NY: Wiley, (including supplements through 2014); and Makrides, S. C. (2003). Gene Transfer and Expression in Mammalian Cells. Amsterdam, NL: Elsevier Sciences B.V., the disclosures of which are incorporated herein by reference.

[0153] DNA vectors can be introduced into eukaryotic cells via conventional transformation or transfection techniques. Suitable methods for transforming or transfecting host cells can be found in Sambrook et al. (2012, supra) and other standard molecular biology laboratory manuals, such as, calcium phosphate transfection, DEAE-dextran mediated transfection, transfection, microinjection, cationic lipid-mediated transfection, electroporation, transduction, scrape loading, ballistic introduction, nucleoporation, hydrodynamic shock, and infection.

[0154] Viral vectors that can be used in the disclosure include, for example, retrovirus vectors, adenovirus vectors, and adeno-associated virus vectors, lentivirus vectors, herpes virus, simian virus 40 (SV40), and bovine papilloma virus vectors (see, for example, Gluzman (Ed.), Eukaryotic Viral Vectors, CSH Laboratory Press, Cold Spring Harbor, N.Y.).

[0155] The precise components of the expression system are not critical. For example, a bispecific binding agent as disclosed herein can be produced in a eukaryotic host, such as a mammalian cells (e.g., COS cells, NIH 3T3 cells, or HeLa cells). These cells are available from many sources, including the American Type Culture Collection (Manassas, Va.). In selecting an expression system, it matters only that the components are compatible with one another. Artisans or ordinary skill are able to make such a determination. Furthermore, if guidance is required in selecting an expression system, skilled artisans may consult P. Jones, “Vectors: Cloning Applications”, John Wiley and Sons, New York, N.Y., 2009).

[0156] The nucleic acid molecules provided can contain naturally occurring sequences, or sequences that differ from those that occur naturally but encode the same gene product because the genetic code is degenerate. These nucleic acid molecules can consist of RNA or DNA (for example, genomic DNA, cDNA, or synthetic DNA, such as that produced by phosphoramidite-based synthesis), or combinations or modifications of the nucleotides within these types of nucleic acids. In addition, the nucleic acid molecules can be double-stranded or single-stranded (e.g., comprising either a sense or an antisense strand).

[0157] The nucleic acid molecules are not limited to sequences that encode polypeptides (e.g., antibodies); some or all of the non-coding sequences that lie upstream or downstream from a coding sequence (e.g., the coding sequence of a bispecific binding agent) can also be included. Those of ordinary skill in the art of molecular biology are familiar with routine procedures for isolating nucleic acid molecules. They can, for example, be generated by treatment of genomic DNA with restriction endonucleases, or by the polymerase chain reaction (PCR). In the event the nucleic acid molecule is a ribonucleic acid (RNA), transcripts can be produced, for example, by in vitro transcription.

### Recombinant Cells and Cell Cultures

[0158] The nucleic acid of the present disclosure can be introduced into a host cell, such as a human B lymphocyte, to produce a recombinant cell containing the nucleic acid molecule. Accordingly, some embodiments of the disclosure relate to methods for making recombinant cells, including the steps of: (a) providing a cell capable of protein expression and (b) contacting the provided cell with any of the recombinant nucleic acids described herein.

[0159] Introduction of the nucleic acid molecules of the disclosure into cells can be achieved by viral infection, transfection, conjugation, protoplast fusion, lipofection, electroporation, nucleofection, calcium phosphate precipitation, polyethyleneimine (PEI)-mediated transfection, DEAE-dextran mediated transfection, liposome-mediated transfection, particle gun technology, calcium phosphate precipitation, direct micro-injection, nanoparticle-mediated nucleic acid delivery, and the like.

[0160] Accordingly, in some embodiments, the nucleic acid molecules are delivered to cells by viral or non-viral delivery vehicles known in the art. For example, the nucleic acid molecule can be stably integrated in the host genome, or can be episomally replicating, or present in the recombinant host cell as a mini-circle expression vector for a stable or transient expression. Accordingly, in some embodiments disclosed herein, the nucleic acid molecule is maintained and replicated in the recombinant host cell as an episomal unit. In some embodiments, the nucleic acid molecule is stably integrated into the genome of the recombinant cell. Stable integration can be completed using classical random genomic recombination techniques or with more precise genome editing techniques such as using guide RNA directed CRISPR/Cas9, or DNA-guided endonuclease genome editing NgAgo (Natronobacterium gregoryi Argonaute), or TALENs genome editing (transcription activator-like effector nucleases). In some embodiments, the nucleic acid molecule present in the recombinant host cell as a mini-circle expression vector for a stable or transient expression.

[0161] The nucleic acid molecules can be encapsulated in a viral capsid or a lipid nanoparticle. For example, introduction of nucleic acids into cells may be achieved by viral transduction. In a non-limiting example, adeno-associated virus (AAV) is a non-enveloped virus that can be engineered to deliver nucleic acids to target cells via viral transduction. Several AAV serotypes have been described, and all of the known serotypes can infect cells from multiple diverse tissue types. AAV is capable of transducing a wide range of species and tissues in vivo with no evidence of toxicity, and it generates relatively mild innate and adaptive immune responses.

[0162] Lentiviral systems are also suitable for nucleic acid delivery and gene therapy via viral transduction. Lentiviral vectors offer several attractive properties as gene-delivery vehicles, including: (i) sustained gene delivery through stable vector integration into host genome; (ii) the ability to infect both dividing and non-dividing cells; (iii) broad tissue tropisms, including important gene- and cell-therapy-target cell types; (iv) no expression of viral proteins after vector transduction; (v) the ability to deliver complex genetic elements, such as polycistronic or intron-containing sequences; (vi) potentially safer integration site profile; and (vii) a relatively easy system for vector manipulation and production.

[0163] In some embodiments, host cells are genetically engineered (e.g., transduced, transformed, or transfected) with, for example, a vector comprising a nucleic acid sequence encoding a bispecific binding agent as described herein, either a virus-derived expression vector or a vector for homologous recombination further comprising nucleic acid sequences homologous to a portion of the genome of the host cell. Host cells can be either untransformed cells or cells that have already been transfected with one or more nucleic acid molecules.

[0164] In some embodiments, the recombinant cell is a prokaryotic cell or a eukaryotic cell. In some embodiments, the cell is transformed in vivo. In some embodiments, the cell is transformed ex vivo. In some embodiments, the cell is transformed in vitro. In some embodiments, the recombinant cell is a eukaryotic cell. In some embodiments, the recombinant cell is an animal cell. In some embodiments, the animal cell is a mammalian cell. In some embodiments, the animal cell is a human cell. In some embodiments, the cell is a non-human primate cell. In some embodiments, the mammalian cell is an immune cell, a neuron, an epithelial cell, and endothelial cell, or a stem cell. In some embodiments, the recombinant cell is an immune system cell, e.g., a lymphocyte (e.g., a T cell or NK cell), or a dendritic cell. In some embodiments, the immune cell is a B cell, a monocyte, a natural killer (NK) cell, a basophil, an eosinophil, a neutrophil, a dendritic cell, a macrophage, a regulatory T cell, a helper T cell, a cytotoxic T cell, or other T cell. In some embodiments, the immune system cell is a T lymphocyte.

[0165] In some embodiments, the cell is a stem cell. In some embodiments, the cell is a hematopoietic stem cell. In some embodiments of the cell, the cell is a lymphocyte. In some embodiments, the cell is a precursor T cell or a T regulatory (Treg) cell. In some embodiments, the cell is a CD34+, CD8+, or a CD4+ cell. In some embodiments, the cell is a CD8+T cytotoxic lymphocyte cell selected from the group consisting of naive CD8+ T cells, central memory CD8+ T cells, effector memory CD8+ T cells, and bulk CD8+ T cells. In some embodiments of the cell, the cell is a CD4+T helper lymphocyte cell selected from the group consisting of naive CD4+ T cells, central memory CD4+ T cells, effector memory CD4+ T cells, and bulk CD4+ T cells. In some embodiments, the cell can be obtained by leukapheresis performed on a sample obtained from a human subject.

[0166] In another aspect, provided herein are various cell cultures including at least one recombinant cell as disclosed herein, and a culture medium. Generally, the culture medium can be any one of suitable culture media for the cell cultures described herein. Techniques for transforming a wide variety of the above-mentioned host cells and species are known in the art and described in the technical and scientific literature. Accordingly, cell cultures including at least one recombinant cell as disclosed herein are also within the scope of this application. Methods and systems suitable for generating and maintaining cell cultures are known in the art.

### Synthesis

[0167] Bispecific binding agents can be synthesized using the techniques of recombinant DNA and protein expression. For example, for the synthesis of DNA encoding a bispecific IgG of the disclosure, suitable DNA sequences encoding the constant domains of the heavy and light chains are widely available. Sequences encoding the selected variable domains are inserted by standard methods, and the resulting nucleic acids encoding full-length heavy and light chains are transduced into suitable host cells and expressed. Alternatively, the nucleic acids can be expressed in a cell-free expression system, which can provide more control over oxidation and reduction conditions, pH, folding, glycosylation, and the like.

[0168] In some embodiments, the bispecific binding agents can have two different complementary determining regions (CDRs), each specific for either the target protein or endogenous cell surface receptor. Thus, two different heavy chains and two different light chains are required. In other embodiments, the bispecific binding agents can have one or more CDRs specific for the target protein and a binding domain (e.g., the second binding domain which can be a chemokine) specific for the endogenous cell surface receptor. See, e.g., FIGS. 1B and 2A. These may be expressed in the same host cell, and the resulting product will contain a mixture of homodimers and bispecific heterodimers. Homodimers can be separated from the bispecific antibodies by affinity purification (for example, first using beads coated with one antigen, then beads coated with the other antigen), reduced to monomers, and reassociated. Alternatively, one can employ a “knobs into holes” design, in which a dimerization region of a heavy chain constant region is altered so that the surface either protrudes (“knob”) from the surface (as compared to the wild type structure) or forms a cavity (“hole”) in such a way that the two modified surfaces are still capable of dimerizing. The knob heavy chain and its associated light chain are then expressed in one host cell, and the hole heavy chain and associated light chain are expressed in a different host cell, and the expressed proteins are combined. The asymmetry in the dimerization regions promotes the formation of heterodimers. To obtain dimerization, the two “monomers” (each consisting of a heavy chain and a light chain) are combined under reducing conditions at a moderately basic pH (e.g., about pH 8 to about pH 9) to promote disulfide bond formation between the appropriate heavy chain domains. See, e.g., U.S. Pat. No. 8,216,805 and EP 1870459A1, incorporated herein by reference.

[0169] Other methods can be used to promote heavy-chain heterodimerization of the first and second polypeptide chains of bispecific antibodies. For example, in some embodiments, the heavy-chain heterodimerization of the first and second polypeptide chains of the engineered antibodies as disclosed herein can be achieved by a controlled Fab arm exchange method as described by F. L. Aran et al., Proc Natl Acad Sci USA (2013) 110(13):5145-50.

[0170] The dimerization process can result in exchange of the light chains between different heavy chain monomers. One method for avoiding this outcome is to replace the binding region of the antibody with a “single chain Fab”, e.g., wherein the light chain CDR is fused to the heavy chain CDR by a linking polypeptide. The Fab region of an IgG (or other antibody) may also be replaced with a scFv, nanobody, and the like.

[0171] The binding activity of the engineered antibodies of the disclosure can be assayed by any suitable method known in the art. For example, the binding activity of the engineered antibodies of the disclosure can be determined by, e.g., Scatchard analysis (Munsen et al., Analyt Biochem (1980) 107:220-39). Specific binding may be assessed using techniques known in the art including but not limited to competition ELISA, BIACORE® assays and/or KINEXA® assays. An antibody that preferentially or specifically binds (used interchangeably herein) to a target antigen or target epitope is a term well understood in the art, and methods to determine such specific or preferential binding are also known in the art. An antibody is said to exhibit specific or preferential binding if it reacts or associates more frequently, more rapidly, with greater duration and/or with greater affinity with a particular antigen or epitope than it does with alternative antigens or epitopes. An antibody specifically or preferentially binds to a target if it binds with greater affinity, avidity, more readily, and/or with greater duration than it binds to other substances. Also, an antibody specifically or preferentially binds to a target if it binds with greater affinity, avidity, more readily, and/or with greater duration to that target in a sample than it binds to other substances present in the sample. For example, an antibody that specifically or preferentially binds to a HER2 epitope is an antibody that binds this epitope with greater affinity, avidity, more readily, and/or with greater duration than it binds to other HER2 epitopes or non-HER2 epitopes. It is also understood by reading this definition, for example, that an antibody which specifically or preferentially binds to a first target antigen may or may not specifically or preferentially bind to a second target antigen. As such, specific binding and preferential binding do not necessarily require (although it can include) exclusive binding.

### Pharmaceutical Compositions

[0172] In some embodiments, the bispecific binding agents, nucleic acids, and recombinant cells of the disclosure can be incorporated into compositions, including pharmaceutical compositions. Such compositions typically include the bispecific binding agents, nucleic acids, and/or recombinant cells, and a pharmaceutically acceptable excipient, e.g., a carrier.

[0173] Bispecific binding agents of the disclosure can be administered using formulations used for administering antibodies and antibody-based therapeutics, or formulations based thereon. Nucleic acids of the disclosure are administered using formulations used for administering oligonucleotides, antisense RNA agents, and/or gene therapies such as CRISPR/Cas9 based therapeutics.

[0174] Pharmaceutical compositions suitable for injectable use include sterile aqueous solutions (where water soluble) or dispersions and sterile powders for the extemporaneous preparation of sterile injectable solutions or dispersion. For intravenous administration, suitable carriers include physiological saline, bacteriostatic water, Cremophor EL™. (BASF, Parsippany, N.J.), or phosphate buffered saline (PBS). In all cases, the composition should be sterile and should be fluid to the extent that it can be administered by syringe. It should be stable under the conditions of manufacture and storage and must be preserved against the contaminating action of microorganisms such as bacteria and fungi. The carrier can be a solvent or dispersion medium containing, for example, water, ethanol, polyol (for example, glycerol, propylene glycol, and liquid polyethylene glycol, and the like), and suitable mixtures thereof. The proper fluidity can be maintained, for example, by the use of a coating such as lecithin, by the maintenance of the required particle size in the case of dispersion and by the use of surfactants, e.g., sodium dodecyl sulfate. Prevention of the action of microorganisms can be achieved by various antibacterial and antifungal agents, for example, parabens, chlorobutanol, phenol, ascorbic acid, thimerosal, and the like. In many cases, it will be generally to include isotonic agents, for example, sugars, polyalcohols such as mannitol, sorbitol, or sodium chloride in the composition. Prolonged absorption of the injectable compositions can be brought about by including in the composition an agent which delays absorption, for example, aluminum monostearate and gelatin.

[0175] Sterile injectable solutions can be prepared by incorporating the active compound in the required amount in an appropriate solvent with one or a combination of ingredients enumerated above, as required, followed by filtered sterilization. Generally, dispersions are prepared by incorporating the active compound into a sterile vehicle, which contains a basic dispersion medium and the required other ingredients from those enumerated above. In the case of sterile powders for the preparation of sterile injectable solutions, the preferred methods of preparation are vacuum drying and freeze-drying which yields a powder of the active ingredient plus any additional desired ingredient from a previously sterile-filtered solution thereof.

[0176] In some embodiments, the bispecific binding agents of the disclosure are administered by transfection or infection with nucleic acids encoding them, using methods known in the art, including but not limited to the methods described in McCaffrey et al., Nature (2002) 418:6893, Xia et al., Nature Biotechnol (2002) 20:1006-10, and Putnam, Am J Health Syst Pharm (1996) 53:151-60, erratum at Am J Health Syst Pharm (1996) 53:325.

[0177] Bispecific binding agents of the disclosure can be administered using a formulation comprising a fusogenic carrier. These are carriers capable of fusing with the plasma membrane of a mammalian cell. Fusogenic carriers include, without limitation, membrane-encapsulated viral particles and carriers based thereon, exosomes and microvesicles (see, e.g., Y. Yang et al., J Extracellular Vessicles (2018) 7:144131), fusogenic liposomes (see, e.g., Bailey et al., U.S. Pat. No. 5,552,155; Martin et al., U.S. Pat. No. 5,891,468; Holland et al., U.S. Pat. No. 5,885,613; and Leamon, U.S. Pat. No. 6,379,698).

### Methods of the Disclosure

[0178] The present disclosure provides, among others, a method of treating a disorder in a subject. The method includes administering to a subject in need thereof, a therapeutically effective amount of the bispecific binding agent, the nucleic acid, the vector, the engineered cell, the immunoconjugate, or the pharmaceutical composition provided herein. The disorder that can be treated by the various compositions described herein can be a neoplastic disorder, an inflammatory disease, metabolic disorder, an endocrine disorder, and a neurological disorder.

[0179] In some embodiments, the condition to be treated includes a neoplastic disorder. Some non-limiting neoplastic disorders that can be treated by the various compositions described herein include, without being limited to, breast cancer, B cell lymphoma, pancreatic cancer, Hodgkin's lymphoma, ovarian cancer, prostate cancer, mesothelioma, lung cancer, non-Hodgkin's B-cell (B-NHL), melanoma, chronic lymphocytic leukemia, acute lymphocytic leukemia, neuroblastoma, glioma, glioblastoma, bladder cancer, and colorectal cancer.

[0180] In some embodiments, the condition to be treated includes an inflammatory disease. Some non-limiting inflammatory diseases that can be treated by the various compositions described herein include, without being limited to, inflammatory intestinal disease, rheumatoid arthritis, lupus, Crohn's disease, and ulcerative colitis.

[0181] In some embodiments, the condition to be treated includes a metabolic disorder. A metabolic disorder generally refers to a disorder that negatively alters the body's processing and distribution of macronutrients such as proteins, lipids, and carbohydrates. For example, metabolic disorders can happen when abnormal chemical reactions in the body alter the normal metabolic process. Metabolic disorders can also include inherited single gene anomalies, most of which are autosomal recessive. Further, metabolic disorders can be complications of severe diseases or conditions, including liver or respiratory failure, cancer, chronic obstructive pulmonary disease (COPD, includes emphysema and chronic bronchitis), and HIV/AIDS. Some non-limiting metabolic disorders that can be treated by the various compositions described herein include, without being limited to, diabetes, Gaucher disease, Hunter syndrome, Krabbe disease, maple syrup urine disease, metachromatic leukodystrophy, mitochondrial encephalopathy, lactic acidosis, stroke-like episodes (MELAS), Niemann-Pick, phenylketonuria (PKU), porphyria, Tay-Sachs disease, and Wilson's disease.

[0182] In some embodiments, the condition to be treated includes an endocrine disorder. Some non-limiting neurological disorders that can be treated by the various compositions described herein include, without diabetes mellitus, acromegaly (overproduction of growth hormone), Addison's disease (decreased production of hormones by the adrenal glands), Cushing's syndrome (high cortisol levels for extended periods of time), Graves' disease (type of hyperthyroidism resulting in excessive thyroid hormone production), Hashimoto's thyroiditis (autoimmune disease resulting in hypothyroidism and low production of thyroid hormone), hyperthyroidism (overactive thyroid), hypothyroidism (underactive thyroid), and prolactinoma (overproduction of prolactin by the pituitary gland).

[0183] In some embodiments, the condition to be treated includes a neurological disorder. Some non-limiting neurological disorders that can be treated by the various compositions described herein include, without being limited to, neurodegenerative disorders (e.g., Parkinson's, or Alzheimer's) or autoimmune disorders (e.g., multiple sclerosis) of the central nervous system; memory loss; long term and short term memory disorders; learning disorders; autism, depression, benign forgetfulness, childhood learning disorders, close head injury, and attention deficit disorder; autoimmune disorders of the brain, neuronal reaction to viral infection; brain damage; depression; psychiatric disorders such as bi-polarism, schizophrenia and the like; narcolepsy/sleep disorders (including circadian rhythm disorders, insomnia and narcolepsy); severance of nerves or nerve damage; severance of the cerebrospinal nerve cord (CNS) and any damage to brain or nerve cells; neurological deficits associated with AIDS; tics (e.g. Giles de la Tourette's syndrome); Huntington's chorea, schizophrenia, traumatic brain injury, tinnitus, neuralgia, especially trigeminal neuralgia, neuropathic pain, inappropriate neuronal activity resulting in neurodysthesias in diseases such as diabetes, MS and motor neurone disease, ataxias, muscular rigidity (spasticity) and temporomandibular joint dysfunction; Reward Deficiency Syndrome (RDS) behaviors in a subject. In some exemplary embodiments, the neurological disorders encompassed herein includes Parkinson's disease, Alzheimer's disease, and multiple sclerosis.

### Administration of Bispecific Binding Agents

[0184] Administration of any one or more of the therapeutic compositions described herein, e.g., bispecific binding agents, nucleic acids, recombinant cells, and pharmaceutical compositions, can be used to treat individuals having a condition described herein. In some embodiments, the bispecific binding agents, nucleic acids, recombinant cells, and pharmaceutical compositions are incorporated into therapeutic compositions for use in methods down-regulating or inactivating T cells, such as CAR-T cells.

[0185] Accordingly, in one aspect, provided herein are methods for inhibiting an activity of a target cell in an individual, the methods comprising the step of administering to the individual a first therapy including one or more of the bispecific binding agents, nucleic acids, recombinant cells, and pharmaceutical compositions provided herein, wherein the first therapy inhibits an activity of the target cell by degrading a target surface protein. For example, an activity of the target cell may be inhibited if its proliferation is reduced, if its pathologic or pathogenic behavior is reduced, if it is destroyed or killed, or the like. Inhibition includes a reduction of the measured quantity of at least about 10%, about 15%, about 20%, about 25%, about 30%, about 35%, about 40%, about 45%, about 50%, about 55%, about 60%, about 65%, about 70%, about 75%, about 80%, about 85%, about 90%, or about 95%. In some embodiments, the methods include administering to the individual an effective number of the recombinant cell as disclosed herein, wherein the recombinant cell inhibits the target cell in the individual by expression of bispecific binding agents. Generally, the target cell of the disclosed methods can be any cell such as, for example an acute myeloma leukemia cell, an anaplastic lymphoma cell, an astrocytoma cell, a B-cell cancer cell, a breast cancer cell, a colon cancer cell, an ependymoma cell, an esophageal cancer cell, a glioblastoma cell, a bladder cancer cell, a glioma cell, a leiomyosarcoma cell, a liposarcoma cell, a liver cancer cell, a lung cancer cell, a mantle cell lymphoma cell, a melanoma cell, a neuroblastoma cell, a non-small cell lung cancer cell, an oligodendroglioma cell, an ovarian cancer cell, a pancreatic cancer cell, a peripheral T-cell lymphoma cell, a renal cancer cell, a sarcoma cell, a stomach cancer cell, a carcinoma cell, a mesothelioma cell, or a sarcoma cell. In some embodiments, the target cell is a pathogenic cell.

[0186] Bispecific binding agents of the disclosure are typically administered in solution or suspension formulation by injection or infusion. In an embodiment, a bispecific binding agent is administered by injection directly into a tumor mass. In another embodiment, a bispecific binding agent is administered by systemic infusion.

[0187] The effective dose of the bispecific binding agents can be determined by a skilled person in the field, e.g. a physician. The effective dose of any given bispecific binding agent may depend on the binding affinity for each of the ligands, and the degree of expression of each of the ligands. The range of effective concentrations, however, can be determined by one of ordinary skill in the art, using the disclosure and the experimental protocols provided herein. Similarly, using the effective concentration one can determine the effective dose or range of dosages required for administration.

[0188] Depending on the disease or disorder to be treated, the severity and extent of the disease, the subject's health, and the co-administration of other therapies, repeated doses may be administered. Alternatively, a continuous administration may be required. It is expected, however, that the bispecific binding agent will remain in proximity to the cell so that each molecule of bispecific binding agent can ubiquitinate and degrade multiple molecules of target surface protein. Thus, the bispecific binding agents of the disclosure may require lower doses, or less frequent administration, than therapies based on antibody competitive binding.

### Administration of Recombinant Cells to an Individual

[0189] In some embodiments, the methods involve administering the recombinant cells to an individual who is in need of such method. This administering step can be accomplished using any method of implantation known in the art. For example, the recombinant cells can be injected directly into the individual's bloodstream by intravenous infusion or otherwise administered to the individual.

[0190] The terms “administering”, “introducing”, and “transplanting” are used interchangeably herein to refer to methods of delivering recombinant cells expressing the bispecific binding agents provided herein to an individual. In some embodiments, the methods comprise administering recombinant cells to an individual by a method or route of administration that results in at least partial localization of the introduced cells at a desired site such that a desired effect(s) is/are produced. The recombinant cells or their differentiated progeny can be administered by any appropriate route that results in delivery to a desired location in the individual where at least a portion of the administered cells or components of the cells remain viable. The period of viability of the cells after administration to an individual can be as short as a few hours, e.g., twenty-four hours, to a few days, to as long as several years, or even long-term engraftment for the life time of the individual.

[0191] When provided prophylactically, in some embodiments, the recombinant cells described herein are administered to an individual in advance of any symptom of a disease or condition to be treated. Accordingly, in some embodiments the prophylactic administration of a recombinant stem cell population serves to prevent the occurrence of symptoms of the disease or condition.

[0192] When provided therapeutically in some embodiments, recombinant stem cells are provided at (or after) the onset of a symptom or indication of a disease or condition, e.g., upon the onset of disease or condition.

[0193] For use in the various embodiments described herein, an effective amount of recombinant cells as disclosed herein, can be at least 10² cells, at least 5×10² cells, at least 10³ cells, at least 5×10³ cells, at least 10⁴ cells, at least 5×10⁴ cells, at least 10⁵ cells, at least 2×10⁵ cells, at least 3×10⁵ cells, at least 4×10⁵ cells, at least 5×10⁵ cells, at least 6×10⁵ cells, at least 7×10⁵ cells, at least 8×10⁵ cells, at least 9×10⁵ cells, at least 1×10⁶ cells, at least 2×10⁶ cells, at least 3×10⁶ cells, at least 4×10⁶ cells, at least 5×10⁶ cells, at least 6×10⁶ cells, at least 7×10⁶ cells, at least 8×10⁶ cells, at least 9×10⁶ cells, or multiples thereof. The recombinant cells can be derived from one or more donors or can be obtained from an autologous source (i.e., the human subject being treated). In some embodiments, the recombinant cells are expanded in culture prior to administration to an individual in need thereof.

[0194] In some embodiments, the delivery of a composition comprising recombinant cells (i.e., a composition comprising a plurality of recombinant cells a bispecific binding agent provided herein) into an individual by a method or route results in at least partial localization of the cell composition at a desired site. A cell composition can be administered by any appropriate route that results in effective treatment in the individual, e.g., administration results in delivery to a desired location in the individual where at least a portion of the composition delivered, e.g., at least 1×10⁴ cells, is delivered to the desired site for a period of time. Modes of administration include injection, infusion, instillation, and the like. Injection modes include, without limitation, intravenous, intramuscular, intra-arterial, intrathecal, intraventricular, intracapsular, intraorbital, intracardiac, intradermal, intraperitoneal, transtracheal, subcutaneous, subcuticular, intraarticular, subcapsular, subarachnoid, intraspinal, intracerebrospinal, and intrasternal injection and infusion. In some embodiments, the route is intravenous. For the delivery of cells, administration by injection or infusion can be made.

[0195] In some embodiments, the recombinant cells are administered systemically, in other words a population of recombinant cells are administered other than directly into a target site, tissue, or organ, such that it enters, instead, the individual's circulatory system and, thus, is subject to metabolism and other like processes.

[0196] The efficacy of a treatment with a composition for the treatment of a disease or condition can be determined by the skilled clinician. However, one skilled in the art will appreciate that a treatment is considered effective treatment if any one or all of the signs or symptoms or markers of disease are improved or ameliorated. Efficacy can also be measured by failure of an individual to worsen as assessed by hospitalization or need for medical interventions (e.g., progression of the disease is halted or at least slowed). Methods of measuring these indicators are known to those of skill in the art and/or described herein. Treatment includes any treatment of a disease in an individual or an animal (some non-limiting examples include a human, or a mammal) and includes: (1) inhibiting disease progression, e.g., arresting, or slowing the progression of symptoms; or (2) relieving the disease, e.g., causing regression of symptoms; and (3) preventing or reducing the likelihood of the development of symptoms.

[0197] As discussed above, a therapeutically effective amount includes an amount of a therapeutic composition that is sufficient to promote a particular effect when administered to an individual, such as one who has, is suspected of having, or is at risk for a disease. In some embodiments, an effective amount includes an amount sufficient to prevent or delay the development of a symptom of the disease, alter the course of a symptom of the disease (for example but not limited to, slow the progression of a symptom of the disease), or reverse a symptom of the disease. It is understood that for any given case, an appropriate effective amount can be determined by one of ordinary skill in the art using routine experimentation.

[0198] In some embodiments, the individual is a mammal. In some embodiments, the mammal is human. In some embodiments, the individual has or is suspected of having a disease associated with cell signaling mediated by a cell surface protein (e.g., a membrane-associated target protein) or a soluble target protein. In some embodiments, the disorder is a neoplastic disorder, an inflammatory disease, and a neurological disorder.

### Systems and Kits

[0199] Also provided herein are systems and kits including the bispecific binding agents, recombinant nucleic acids, recombinant cells, or pharmaceutical compositions provided and described herein as well as written instructions for making and using the same. For example, provided herein, in some embodiments, are systems and/or kits that include one or more of: a bispecific binding agent as described herein, a recombinant nucleic acid as described herein, a recombinant cell as described herein, or a pharmaceutical composition as described herein. In some embodiments, the systems and/or kits of the disclosure further include one or more syringes (including pre-filled syringes) and/or catheters used to administer one any of the provided bispecific binding agents, recombinant nucleic acids, recombinant cells, or pharmaceutical compositions to an individual. In some embodiments, a kit can have one or more additional therapeutic agents that can be administered simultaneously or sequentially with the other kit components for a desired purpose, e.g., for modulating an activity of a cell, inhibiting a target cancer cell, or treating a disease in an individual in need thereof.

[0200] Any of the above-described systems and kits can further include one or more additional reagents, where such additional reagents can be selected from: dilution buffers; reconstitution solutions, wash buffers, control reagents, control expression vectors, negative control polypeptides, positive control polypeptides, reagents for in vitro production of the bispecific binding agents.

[0201] In some embodiments, a system or kit can further include instructions for using the components of the kit to practice the methods. The instructions for practicing the methods are generally recorded on a suitable recording medium. For example, the instructions can be printed on a substrate, such as paper or plastic, and the like. The instructions can be present in the kits as a package insert, in the labeling of the container of the kit or components thereof (i.e., associated with the packaging or sub-packaging), and the like. The instructions can be present as an electronic storage data file present on a suitable computer readable storage medium, e.g. CD-ROM, diskette, flash drive, and the like. In some instances, the actual instructions are not present in the kit, but means for obtaining the instructions from a remote source (e.g., via the internet), can be provided. An example of this embodiment is a kit that includes a web address where the instructions can be viewed and/or from which the instructions can be downloaded. As with the instructions, this means for obtaining the instructions can be recorded on a suitable substrate.

### EXAMPLES

[0202] While particular alternatives of the present disclosure have been disclosed, it is to be understood that various modifications and combinations are possible and are contemplated within the true spirit and scope of the appended claims. There is no intention, therefore, of limitations to the exact abstract and disclosure herein presented.

### Example 1: KineTACs Mediate the Degradation of PD-L1

[0203] This Example demonstrates an exemplary bispecific binder that targets endogenous cell-surface receptors of CXCL12 and PD-L1.

[0204] To demonstrate proof-of-concept that KineTACs can degrade cell surface proteins, PD-L1 was chosen as a first target. Overexpression of PD-L1 on cancer cells leads to the inhibition of checkpoint protein PD-1 and suppression of cytotoxic T cell activity. PD-L1 has been successfully degraded by both AbTACs and LYTACs. Further, a recent paper demonstrated that homodimerization-induced internalization of PD-L1 could offer efficacy of checkpoint blockade comparable to anti-PD-L1 blocking antibodies. Thus, PD-L1 was an ideal first target to test our KineTAC platform. First, knob-in-hole bispecifics were generated in which CXCL12 chemokine was N-terminally fused to the knob Fc domain and the antibody sequence for Tecentriq (atezolizumab), an FDA approved inhibitor of PD-L1, was fused to the hole Fc (FIG. 2A). CXCL12-bispecifics are not limited by the light chain mispairing problem, which is common to bispecific IgGs with Fabs on both arms, enabling full assembly of KineTACs during expression. A histidine tag was introduced on the knob arm to allow purification of the formed bispecific away from hole-hole homodimers that may form. Next, it was tested whether our PD-L1 targeting KineTAC (herein termed CXCL12-Tec or CXCL12-Atz) can bind both PD-L1 and CXCR4/CXCR7. Biolayer interferometry (BLI) was used to determine whether CXCL12-Tec binds PD-L1. Briefly, PD-L1 ectodomain fused to an Fc domain was immobilized on a BLI tip, after which varying concentrations of CXCL12-Tec was added. It was observed that CXCL12-Tec binds with pico-molar affinity to PD-L1 Fc fusion (FIG. 2B). Next, flow cytometry was used to assess binding of the CXCL12 arm on cells known to express CXCR4 and CXCR7. To eliminate off-target binding of the hole arm, an isotype control of the CXCL12 bispecific was expressed in which the Fab arm comprised of a viral protein binder. It was observed that CXCL12 isotype binds triple negative breast cancer cell line MDA-MB-231, suggesting that CXCL12 is functional in the bispecific construct (FIG. 2C).

[0205] To determine whether CXCL12-Tec, also termed CXCL12-Atz herein, could degrade PD-L1, MDA-MB-231 cells was treated, which endogenously co-express PD-L1, CXCR4, and CXCR7, with varying concentrations of CXCL12-Tec. After 24 hr treatment, levels of PD-L1 protein were quantified using western blotting. Excitingly, it was observed that both glycosylated forms of PD-L1 were substantially degraded after 24 hr treatment (FIG. 2D), with a maximal percent degradation (Dₘₐₓ) of 67% occurring at 100 nM CXCL12-Tec. Interestingly, no “hook effect” was observed within the concentration regime tested and at higher concentrations, demonstrating a potential advantage of KineTACs as compared to other bifunctional degrader technologies (FIG. 10C). Control antibodies, including Tecentriq Fab or CXCL12-Isotype, do not induce degradation of PD-L1 either alone or in combination (FIGS. 2E-F). Finally, flow cytometry and western blotting were used to verify that the PD-L1 degradation observed is due to depletion of cell surface PD-L1 (Extended Data FIG. 1c-d) FIGS. 10A-10B. Thus, PD-L1 degradation is dependent on the bispecific KineTAC scaffold and occurs in a dose-dependent manner.

### Example 2: KineTAC Platform is Generalizable to Targeting Various Therapeutically Relevant Cell Surface Proteins

[0206] This Example sought to determine whether the KineTAC platform could be applied towards the degradation of other therapeutically relevant cell surface proteins.

[0207] First, human epidermal growth factor receptor 2 (HER2) was targeted, which is frequently upregulated in cancer. In particular, HER2 overexpression is linked to breast cancer invasiveness and tumor progression. As such, numerous small molecule and biologic inhibitors of HER2 have been developed to inhibit breast cancer cell growth. To develop a KineTAC targeting HER2, the antibody sequence for Herceptin (trastuzumab) was incorporated, an FDA approved HER2 inhibitor, into the KineTAC scaffold (herein termed CXCL12-Tras). The ability of CXCL12-Tras to degrade HER2 in breast cancer cell line MCF-7 was tested and found that after 24 hrs HER2 was significantly degraded compared to Trastuzumab Fab treatment alone, with a Dₘₐₓ of 54% (FIG. 3A). Next step was to determine how the ratio of HER2 and CXCR4/CXCR7 expression levels may impact the maximal levels of degradation. Breast cancer cell lines MDA-MB-175VII and SK-BR-3, which express increasing levels of HER2, were treated with CXCL12-Tras for 24 hrs. Indeed, increasing the ratio of HER2:CXCR4/CXCR7 decreased the levels of HER2 degradation, with a Dₘₐₓ of 64% and 20% observed in MDA-MB-175VII and SK-BR-3, respectively (FIGS. 3B-D). Furthermore, we find that the maximal percent degradation mediated by KineTACs is slightly correlated to the expression of the target protein relative to CXCR7 (R²=0.439) (Extended Data FIG. 2c) FIG. 11. Thus, the maximal levels of degradation mediated by KineTACs is dependent on the expression level of the target protein compared to CXCR4/CXCR7.

[0208] Next, it was sought to expand KineTACs to targeting epidermal growth factor receptor (EGFR) for degradation. EGFR is implicated as a driver of cancer progression, and EGFR inhibitors are approved for use in non-small cell lung, colorectal, and gastric cancers. KineTACs targeting EGFR was developed by incorporating Erbitux (cetuximab), an FDA approved EGFR inhibitor, into the KineTAC scaffold (herein termed CXCL12-Ctx). It was then tested for degradation in HeLa cells after 24 hr treatment and found that EGFR levels were dramatically reduced, with a Dₘₐₓ of 86% observed (FIG. 3E). This result was recapitulated in various breast and lung cancer cell lines, including MDA-MB-231, A431, NCI-H292, A549, NCI-H358, and HCC827, and the levels of maximal percent degradation were slightly correlated to the expression of EGFR relative to CXCR7 (R²=0.631) (FIG. 1j, Extended Data FIG. 2d-h). FIGS. 12A-12F. Finally, it was tested whether KineTACs could be used to degrade CUB domain-containing protein 1 (CDCP1), which had been previously identified to be upregulated on the surface of KRAS^{G12V} transformed cells. Previously described 4A06 antibody, which selectively binds CDCP1, was introduced into the KineTAC construct (herein termed CXCL12-4A06). Next, HeLa cells known to express CDCP1 were treated with CXCL12-4A06 and observed near complete degradation of CDCP1 after 24 hrs, with a Dₘₐₓ of 93% (FIG. 3F). KineTACs also enabled the degradation of tumor-associated calcium signal transducer 2 (TROP2), the overexpression of which has been linked to tumor progression in a variety of tumors.^{29,30} In MCF7 cells, we observed a Dₘₐₓ of 51% after treatment with TROP2 targeting KineTAC (Extended Data FIG. 2j) FIG. 13. We then tested whether KineTACs can degrade the checkpoint protein PD-1 in CD8+ T cells isolated from primary human peripheral blood mononuclear cells. T cells were first activated, causing overexpression of PD-1 on the cell surface along with other activation markers (Extended Data FIG. 3a-b) FIGS. 14A-14B. Activated T cells were then treated for 24 hr with a PD-1 targeting KineTAC, which incorporates the antibody sequence for nivolumab (Opdivo), an FDA approved PD-1 inhibitor (herein termed CXCL12-Nivo). Following treatment with CXCL12-Nivo, cell surface PD-1 levels were dramatically reduced, with a Dₘₐₓ of 82%, compared to nivolumab isotype control, which is known to induce slight internalization of PD-1 (FIG. 1k, Extended Data FIG. 3c) FIG. 14C.³¹. Overall, these results demonstrate the generality of the KineTAC platform for degrading various cell surface proteins for degradation. Furthermore, it was found that different protein targets display varying levels of degradation following KineTAC treatment.

[0209] Table 3 below shows ratios of CXCR4 and HER2 expression (TPM) in MCF-7, MDA-MB-175VII, and SK-BR-3 cells. Values were obtained from Victoria.ucsf.edu online database.

TABLE 3
Ratios of CXCR4 and HER2 expression
(TPM) in exemplary cell lines.

| Cell line | CXCR4 TPM | HER2 TPM | RATIO |
|---|---|---|---|
| MCF7 | 85 | 45 | 1.89 |
| MDA-MB-175VII | 290 | 290 | 1 |
| SK-BR-3 | 15 | 1000 | 0.02 |

Table 4 below shows a summary of CXCR7:target ratios and maximal degradation (Dₘₐₓ) for each cell surface KineTAC target.

TABLE 4
Ssummary of CXCR7:target ratios and maximal degradation
(Dₘₐₓ) for each cell surface KineTAC target

| | | CXCR7:Target | |
|---|---|---|---|
| Target Protein | Cell Line | mRNA Ratio¹ | Dₘₐₓ (%) |
| PD-L1 | MDA-MB-231 | 0.5 | 73 |
| HER2 | MCF7 | 8.6 | 51 |
| HER2 | MDA-MB-175VII | 1.3 | 62 |
| HER2 | SK-BR-3 | 0.03 | 26 |
| EGFR | HeLa | 6.0 | 84 |
| EGFR | A431 | 0.4 | 54 |
| EGFR | MDA-MB-231 | 0.2 | 66 |
| EGFR | NCI-H292 | 0.1 | 74 |
| EGFR | A549 | 0.2 | 72 |
| EGFR | NCI-H358 | 0.04 | 79 |
| EGFR | HCC827 | 0.0004 | N/A |
| PD-1 | Primary CD8+ T cells | N/A | 82 |
| CDCP1 | HeLa | 5.6 | 94 |
| TROP2 | MCF7 | 1.8 | 51 |

### Example 3: Mechanism of KineTAC-Mediated Degradation

[0210] Following demonstration of proof-of-concept, this Example sought to evaluate the mechanism of KineTAC-mediated degradation.

[0211] To determine whether KineTACs catalyze degradation via the lysosome or proteasome, MDA-MB-231 cells were pre-treated with either media alone, bafilomycin (an inhibitor of lysosome acidification), or MG-132 (a proteasome inhibitor). After 1 hr pre-treatment, cells were treated with 100 nM CXCL12-Tec for 24 hrs. It was observed that bafilomycin pre-treatment inhibited degradation of PD-L1, while MG-132 had no effect (FIG. 4A), thus demonstrating that KineTACs mediate the degradation via delivery of target proteins to the lysosome. Immunofluorescent microscopy revealed complete removal of EGFR from the cell surface following 24 hr CXCL12-Ctx treatment as compared to the cetuximab isotype, further highlighting that KineTACs induce robust internalization of target proteins (FIG. 3b) FIG. 31. Next, it was tested whether KineTAC-mediated degradation was time-dependent. Indeed, degradation begins as early as 6 hrs post-treatment, with the levels of PD-L1 continuing to decrease over time to near complete degradation at 48 hrs (FIGS. 4B-C). One possibility for the lack of complete PD-L1 degradation at 24 hrs could be that an intracellular pool of PD-L1 is not accessible for recognition by the KineTAC. To verify this possibility, a membrane impermeable biotin derivative was used to label cell surface proteins post-KineTAC treatment. The cell surface levels of PD-L1 were then compared to the whole cell levels using western blotting, revealing that the level of PD-L1 degradation is similar between these two samples (FIG. 4D). Thus, it is unlikely that an intracellular pool of PD-L1 exists that is escaping degradation.

[0212] Next, it was sought to elucidate the mechanism of CXCL12 internalization that enables KineTAC-mediated degradation. As mentioned, CXCL12 binds both CXCR4 and CXCR7, and the outcome of cytokine-receptor binding is different depending on which receptor is engaged. Three possibilities for the mechanism exist: 1) CXCR4 only, 2) CXCR7 only, or 3) both CXCR4 and CXCR7 are being engaged (FIG. 5A). To begin to address these possibilities, RNA interference was used to knockdown levels of CXCR4 in HeLa cells expressing EGFR (FIG. 5B). After 48 hr transfection with CXCR4-targeting or control siRNA pools, cells were treated with 100 nM CXCL12-Ctx for 24 hrs. Western blotting analysis revealed that EGFR degradation levels are unchanged when CXCR4 is knocked down (FIG. 5C). This data does not rule out CXCR4 involvement in KineTAC degradation but does indicate that degradation is not only mediated by CXCR4. Furthermore, KineTACs bearing CXCL11, a chemokine that specifically binds CXCR7 and CXCR3 but not CXCR4⁴², are capable of efficiently degrading both PD-L1 and EGFR (FIG. 3g, Extended Data FIG. 5a-d) FIGS. 15A-15F. vMIPII, a viral chemokine that targets CXCR7 along with other chemokine receptors, was also active as a KineTAC in efficiently degrading PD-L1 (Extended Data FIG. 5e) FIG. 15F. Our results suggest that CXCR7 is the receptor responsible for KineTAC-mediated degradation and demonstrates the exciting opportunity for using alternative cytokines, such as CXCL11, in the KineTAC scaffold to degrade target proteins.

### Example 4: KineTACs do not Induce Major Cellular Perturbations

[0213] This Example explores whether proteome-wide changes occurred following KineTAC treatment.

[0214] First, quantitative mass spectrometry was used to determine whether proteome-wide changes occurred following KineTAC treatment. Both the surface-enriched and whole cell lysates were analyzed following 48 hr CXCL12-Tec treatment compared to PBS treated control. The surface-enriched sample revealed no significant changes to the proteome, with PD-L1 being the only protein downregulated in CXCL12-Tec treatment compared to control (FIG. 6A). Whole cell proteomics also revealed that no major changes are occurring (FIG. 6B). PD-L1 was not detected in the whole cell sample, likely due to low abundance of cell surface proteins relative to cytosolic proteins. Similar results were observed for EGFR degradation, with no major proteome-wide changes occurring and EGFR being virtually the only protein significantly downregulated in CXCL12-Ctx treatment compared to control in both the surface-enriched and whole cell proteomics (FIG. 3j-k,) FIG. 16A-16B. Moreover, CXCR4 and CXCR7 peptide IDs were not altered in the surface-enriched sample, and CXCR4 IDs were also unchanged in the whole cell sample, indicating that treatment with KineTAC does not significantly impact CXCR4 or CXCR7 levels. CXCR7 peptide IDs were not identified in the whole cell sample due to low abundance relative to cytosolic proteins. Furthermore, protein levels of GRB2 and SHC1, which are known interacting partners of EGFR43,44, were also not significantly changed. We do observe ABCD1 and BGH3 significantly downregulated in the PD-L1 and EGFR datasets, respectively. However, these appear to be unrelated to either target protein or CXCR7, suggesting that non-specific downregulation occurred. These data suggest that KineTACs are highly selective for the target protein without altering levels of the degrading receptor or known interacting partners to the protein of interest. Interestingly, a previously published proteomics dataset of LYTAC-mediated EGFR degradation identified about two dozen proteins significantly up- or down-regulated following LYTAC treatment.4 In our dataset, we observed 89% of the proteins identified in the total LYTAC dataset, including 23 of the 25 proteins seen to significantly change after LYTAC treatment (Extended Data FIG. 6a-b) FIGS. 17A-17B. This suggests that KineTACs may be more selective in degrading EGFR.

[0215] The next question is whether KineTAC-mediated degradation was reversible, thereby not imparting permanent changes to the proteome. A washout experiment was performed in which cells were treated with KineTAC for 24 hrs, at which point the media was removed and fresh media added for the duration of the experiment. Interestingly, PD-L1 levels continued to decrease up to 48 hrs post-washout in MDA-MB-231 cells treated with 100 nM CXCL12-Tec (FIG. 6C). This result contrasts with washout experiments done both with AbTACs and small molecule internalizers of PD-L1, where PD-L1 levels recover between 24-48 hr post-washout. However, this effect appears to be target-specific. In the same experiment, EGFR levels begin to recover 24 hrs post-washout, and are fully recovered at 48 hrs post-washout in HeLa cells treated with 100 nM CXCL12-Ctx (FIG. 6D). These data could suggest that recovery of the target protein is dependent on the resynthesis rate of that protein. Another possibility could be the internalization and recycling kinetics of CXCR4 and CXCR7 in the different cell types.

### Example 5: Requirements for Efficient KineTAC-Mediated Degradation

[0216] This Example explored the requirements for efficient KineTAC-mediated degradation.

[0217] Multiple aspects of the KineTAC construct scaffold could be altered to optimize the platform for maximal levels of degradation. These include the cytokine activity, antibody binding affinity to target, construct, pH sensitivity, and Fc domain glycosylation. To determine whether CXCL12 activity impacts degradation, previously described antagonistic variants were created. Two variants, CXCL12^{ΔKP} and CXCL12^{R8E}, are reported antagonists of CXCR4. Though the activity of the CXCL12^{R8E} towards CXCR7 is unknown, the CXCL12^{ΔKP} variant retains reduced agonism of CXCR7. The third variant, CXCL12^{ΔKPVS}, is a reported antagonist of both CXCR4 and CXCR7. These different variants were then incorporated into the KineTAC scaffold with Tecentriq and levels of PD-L1 post-treatment determined by western blotting. It was observed that all three CXCR4 antagonistic variants retain the ability to degrade PD-L1, albeit at a slightly decreased level compared to the CXCL12^{WT} KineTAC. Further, the antagonist of both CXCR4 and CXCR7, CXCL12^{ΔKPVS}, can also degrade PD-L1 with a Dₘₐₓ of 46% (FIG. 7A). Thus, converting CXCL12 into an antagonist does not rescue PD-L1 levels, suggesting that our KineTAC continues to be internalized without agonism of either receptor. This continued internalization is likely due to binding CXCR7, as the receptor is known to constitutively internalize and recycle in a ligand-independent manner.

[0218] Next, it was probed whether altering the antibody to target binding affinity affected the levels of KineTAC-mediated degradation. To this end, alanine mutations were introduced into key interacting residues of Tecentriq's complementary determining regions (CDRs) to engineer Tecentriq mutants with a range of binding affinities (K_{D}) to PD-L1. BLI was used to measure the K_{D}s of these alanine mutants in Fab format (Table 4). These Fabs were then converted into our bispecific KineTAC scaffold with CXCL12^{WT} and tested for their ability to degrade PD-L1 in MDA-MB-231 cells after 24 hr treatment at 100 nM (FIG. 7B). Correlating the PD-L1 levels post-treatment to the different kinetic parameters of these binders, it was observed that degradation is correlated to the K_{D} (R²=0.6376) and the dissociation rate (K_{off}, R²=0.8035) but not to the association rate (Kₒₙ, R²=0.0362) (FIG. 7C). Of the mutants tested, wild-type Tecentriq had the highest binding affinity and induced the greatest level of PD-L1 degradation. Next, to test dependence on affinity to CXCR7, previously described N-terminal antagonistic variants of CXCL12 with a range of binding affinities to CXCR7 (0.014-28 nM) were introduced into the KineTAC scaffold with atezolizumab and tested for their ability to degrade PD-L1 (Extended Data FIG. 4b). FIG. 24A³⁵ Here, we find that degradation is not highly correlated to the IC50 against CXCR7 (R²=0.206) (Extended Data FIG. 4c) FIG. 24B. Therefore, the levels of degradation are dependent on the binding affinity of the antibody arm to the target protein.

TABLE 5
In vitro binding affinities of Tecentriq alanine mutants.

| Mutant | K_{D} (nM) | Kₒₙ (M⁻¹s⁻¹) | K_{off} (s⁻¹) |
|---|---|---|---|
| WT | 0.334 | 1.87 × 10⁵ | 6.24 × 10⁻⁵ |
| S57A HC | 0.518 | 2.53 × 10⁵ | 1.31 × 10⁻⁴ |
| D31A HC | 4.93 | 1.10 × 10⁵ | 5.44 × 10⁻⁴ |
| S30A HC | 1.40 | 4.36 × 10⁴ | 6.09 × 10⁻⁵ |
| W33A HC | N.D. | N.D. | N.D. |
| W50A HC | 63.1 | 1.38 × 10⁵ | 8.69 × 10⁻³ |
| W101A HC | 458 | 1.10 × 10⁴ | 5.02 × 10⁻³ |
| S30A LC | 1.23 | 8.48 × 10⁴ | 1.05 × 10⁻⁴ |
| Y93A LC | 5.12 | 2.16 × 10⁵ | 1.10 × 10⁻³ |
| L92A LC | 2.73 | 2.88 × 10⁵ | 7.86 × 10⁻⁴ |

[0219] To determine whether a pH-dependent antibody binder against the target protein would affect degradation, BMS936559, an anti-PD-L1 antibody currently being tested in the clinic and reported to release PD-L1 in acidic (pH<6.0) conditions, was introduced into the KineTAC scaffold. Treatment with CXCL12-BSM936559 compared to CXCL12-Tec showed that pH-dependent release of PD-L1 slightly decreases the maximal level of degradation observed (FIG. 7D). As Tecentriq and BMS936559 are reported to have similar binding affinities to PD-L1, this result is not due to differences in K_{D}. Therefore, premature release of the target protein could impair the ability of the KineTAC to mediate its internalization and lysosomal degradation. Additionally, to investigate whether the binding epitope on the protein of interest could impact degradation, we tested additional HER2 and EGFR targeting antibodies into the KineTAC scaffold that have been described to bind different epitopes. For HER2, pertuzumab (Perjeta), which is known to bind a distinct epitope from trastuzumab on HER2³⁸, was introduced into the KineTAC scaffold (herein termed CXCL12-Ptz). Following 24 hr treatment of MCF7 cells, we find that CXCL12-Tras is superior to CXCL12-Ptz at lower concentrations while reaching the same Dₘₐₓ, indicating that epitope can alter the dose response to KineTACs (FIG. 2h) FIG. 25A. This effect is not due to differences in binding affinity, as trastuzumab and pertuzumab have reported in vitro K_{D}s of 1.43 and 1.92 nM, respectively.³⁹ For EGFR, we introduced five different anti-EGFR binders (depatuxizumab, nimotuzumab, panitumumab (Vectibix), necitumumab (Portrazza), and matuzumab)⁴⁰ into the KineTAC scaffold that bind different epitopes on EGFR domains II and III (Extended Data FIG. 4d) FIG. 26A. Following 24 hr treatment of HeLa cells, we observed that some epitope binders, such as necitumumab and matuzumab, retained similar levels of EGFR degradation compared to CXCL12-Ctx, while other epitope binders, such as depatuxizumab, nimotuzumab, and panitumumab, abrogated or impaired the ability to degrade EGFR (FIG. 2i) FIG. 25B. Lack of degradation for CXCL12-Depa and CXCL12-Nimo could be due to these antibodies binding further from the cell surface, which may impair the ability of the KineTAC to simultaneously bind both EGFR and CXCR7. Further, the degradation observed for each binder is not correlated to their respective binding affinities (R²=0.008, Extended Data FIG. 4e) FIG. 26B. This data highlights the dependence of KineTAC-mediated degradation on target binding epitope. Next, it was sought to determine whether glycosylation of the KineTAC Fc domain at N297 would impact degradation. IgGs are commonly mutated to N297G when creating an aglycosylated form to eliminate effector function. However, glycosylation at N297 can impart greater stability and favorable pharmacokinetic properties. The glycosylation site at N297 was re-introduced to the CXCL12-Tec scaffold and the degradation efficiency between the glycosylated and aglycosylated forms compared. It was observed that glycosylation at N297 does not significantly impact PD-L1 degradation levels in vitro (FIG. 7E). Thus, the stability and pharmacokinetic properties of KineTACs can be improved for in vivo use without major disruption to degradation efficiency.

[0220] Finally, it was determined whether the bispecific antibody construct used could influence levels of degradation. To this end, a diabody construct in which CXCL12 was N-terminally fused to the heavy chain of Tecentriq Fab via a flexible Avidin tag linker was co-expressed with Tecentriq Fab light chain. The CXCL12-Tec diabody construct retained binding to PD-L1 Fc fusion as measured by BLI (FIG. 8A). After 24 hr treatment in MDA-MB-231, the levels of PD-L1 were measured by western blotting. While the bispecific IgG construct caused significant degradation of PD-L1, the diabody construct was unable to induce significant degradation, with a Dₘₐₓ of only 20% observed (FIG. 8B). We next tested whether an IgG fusion construct where CXCL12 is N-terminally fused to N-terminus of either the heavy chain or light chain of the Fab arm could mediate degradation (Extended Data FIG. 4j) FIG. 27A. Here, we again found that the bispecific IgG construct was preferred as the IgG fusions were unable to induce significant degradation of PD-L1 relative to isotype controls (Extended Data FIG. 4k) FIG. 27B. The differences in degradation between these constructs could be due to a number of factors, including construct rigidity and linker length. Overall, this data demonstrates that the bispecific knob-in hole IgG is a privileged KineTAC scaffold.

### Example 6: Functional Consequences to Degradation with KineTACs

[0221] This Example explores the functional consequences to degradation with KineTACs.

[0222] To elucidate whether KineTAC-mediated degradation could impart functional cellular consequences, cell viability of HER2 expressing cells was measured after treatment with CXCL12-Tras. MDA-MB-175VII and SK-BR-3 are breast cancer cell lines that are both reported to be sensitive to Trastuzumab treatment. These cell lines served as ideal models to test the functional consequence of HER2 degradation compared to inhibition with Trastuzumab Fab or IgG. To this end, cells were treated with either CXCL12-Tras, Fab, or IgG for 5 days, after which the cell viability was determined using a modified MTT assay. In MDA-MB-175VII cells, reduction in cell viability was observed at higher concentrations of CXCL12-Tras (IC₅₀=86.8 nM) and was significantly greater than Trastuzumab Fab or IgG alone (FIG. 9A). Although the Dₘₐₓ of HER2 degradation in SK-BR-3 was much lower than in MDA-MB-175VII (20% vs. 64%, respectively), treatment of SK-BR-3 cells with CXCL12-Tras also induced significant reduction in cell viability at high concentrations (IC₅₀=198.9 nM) (FIG. 9B). Reduction in cell viability was observed at higher concentrations of CXCL12-Tras and was significantly greater than trastuzumab IgG, trastuzumab Fab, or CXCL12 isotype alone (FIG. 31, Extended Data. FIG. 6c-d) FIGS. 28A-28B. We also found significant differences in cell viability in non-small cell lung cancer NCI-H358 cells treated with either CXCL12-Ctx or cetuximab IgG (Extended Data FIG. 6e) FIG. 28C. These data demonstrate that KineTAC-mediated degradation can cause functional consequences in reducing cancer cell viability in vitro. Furthermore, significant degradation of the HER2 is not needed to induce major reductions in cell viability.

### Example 7: KineTACs have Favorable PK Properties Despite Cross-Reactivity with Mouse

[0223] We next asked whether KineTACs would have similar antibody clearance to IgGs in vivo. To this end, male nude mice were injected intravenously with 5, 10, or 15 mg/kg CXCL12-Tras, which is a typical dose range for antibody xenograft studies. Western blotting analysis of plasma antibody levels revealed that the KineTAC remained in plasma up to 10 days post-injection with a half-life of 8.7 days, which is comparable to the reported half-life of IgGs in mice (FIG. 3m FIG. 18, Extended Data FIG. 7a) FIG. 19A.46 Given the high homology between human and mouse CXCL12, we tested whether human CXCL12 isotype was cross-reactive. In fact, human CXCL12 isotype bound to mouse cell lines MC38 and CT26 that endogenously express mouse CXCR7 (Extended Data FIG. 7b-c) FIGS. 19B-19C. Together, these results demonstrate that KineTACs have favorable stability and are not being rapidly cleared despite cross-reactivity with mouse CXCR7 receptors. Since atezolizumab is also known to be cross-reactive, CXCL12-Atz ability to degrade mouse PD-L1 was tested in both MC38 and CT26. Indeed, CXCL12-Atz mediates near complete degradation of mouse PD-L1 in both cell lines (Extended Data FIG. 7d-f) FIGS. 19D-19F. Thus, we observe a long in vivo half-life of KineTACs despite cross-reactivity and binding to mouse CXCR7 receptors.

### Example 8: KineTACs can Target Extracellular Soluble Proteins

[0224] Having demonstrated the ability of KineTACs to mediate cell surface protein degradation, we next asked whether KineTACs could also be applied towards the degradation of soluble extracellular proteins. Antibodies binding to soluble ligands, such as vascular endothelial growth factor (VEGF) and tumor necrosis factor alpha (TNFa), are of tremendous therapeutic importance.47 Thus, we investigated whether KineTACs could promote cellular uptake of either VEGF or TNFa (FIG. 4a) FIG. 20A. VEGF was targeted by incorporating bevacizumab (Avastin), an FDA approved VEGF inhibitor, into the KineTAC scaffold (herein termed CXCL12-Beva). HeLa cells were incubated with VEGF-647 or VEGF-647 plus CXCL12-Beva for 24 hr. Following treatment, flow cytometry analysis showed a robust, 32-fold increase in cellular fluorescence when VEGF-647 was co-incubated with CXCL12-Beva, but not bevacizumab isotype which lacks the CXCL12 arm (FIG. 4b-c) FIGS. 20B-20C. To ensure that the increased cellular fluorescence was due to intracellular uptake of VEGF-647 and not surface binding, we determined the effect of a trypsin lift post-treatment which removes any cell surface VEGF-647 binding (Extended Data FIG. 8a-b) FIGS. 21A-21B. We do observe a difference between Beva isotype treated cells, which may reflect slight non-specific internalization that occurs with the trypsin lift. However, this difference was not observed for CXCL12-Beva. We found that there was no significant difference in cellular fluorescence levels between trypsin and normal lifted cells treated for 24 hr with CXCL12-Beva (FIG. 4d) FIG. 20D. Pre-treatment with bafilomycin, a lysosome inhibitor, also impairs the ability of CXCL12-Beva to uptake extracellular VEGF-647 as observed by a decrease in cellular fluorescence (FIG. 4e) FIG. 20E. VEGF-647 uptake was not completely impaired, likely due to bafilomycin blocking the conversion of endosome to lysosome, which would still allow some VEGF-647 to be endocytosed but not degraded. Together, these data suggest that KineTACs successfully mediate the intracellular uptake of extracellular VEGF and delivery to the lysosome. Similar to membrane protein degradation, KineTAC-mediated uptake of VEGF occurs in a time-dependent manner, with robust internalization occurring before 6 hrs and reaching steady state by 24 hrs (FIG. 4f) FIG. 20F. Furthermore, the levels of VEGF uptake are dependent on the KineTAC:ligand ratio and saturate at ratios greater than 1:1 (FIG. 4g) FIG. 20G. We next tested the ability of CXCL12-Beva to promote uptake on other cell lines, including breast and lung cancer lines, and find that these cells also significantly uptake VEGF (FIG. 4h) FIG. 20H. Moreover, the extent of uptake is correlated with the transcript levels of CXCR7 in these cells (R2=0.555, Extended Data FIG. 8c) FIG. 21C. These data suggest that KineTACs directed against soluble ligands can promote uptake of extracellular soluble ligands and that cell lines expressing higher levels of CXCR7 lead to greater uptake.

[0225] We next targeted TNFa by incorporating adalimumab (Humira), an FDA approved TNFa inhibitor, into the KineTAC scaffold (herein termed CXCL12-Ada). Following 24 hr treatment of HeLa cells, significant, 8.5-fold increase in cellular fluorescence was observed when TNFa-647 was co-incubated with CXCL12-Ada compared to adalimumab isotype (Extended Data FIG. 9a-b) FIGS. 22A-22B. Consistent with the VEGF uptake experiments, TNFa uptake was dependent on the KineTAC:ligand ratio (Extended Data FIG. 9c) FIG. 22C. Thus, KineTACs are generalizable in mediating the intracellular uptake of soluble ligands, significantly expanding the target scope of KineTAC-mediated targeted degradation.

### Example 9: Other Receptors can be Used for KineTAC-Mediated Degradation

[0226] Finally, we asked whether alternative cytokine receptors could be co-opted by KineTACs to mediate the clearance of target proteins. We hypothesized that KineTACs bearing IL2 cytokine could engage CD25 as a degrader receptor, which is known to internalize and recycle back to the cell surface upon heterotrimer formation with IL2RB and IL2RG (Extended Data FIG. 10a) FIG. 23A. We generated knob-in-hole KineTACs in which human IL2 cytokine was N-terminally fused to the knob IgG1 Fc domain and the second arm contained the Fab antibody sequence for nivolumab. Activated T cells were then treated for 24 hr with IL2-bearing PD-1 KineTAC (herein termed IL2-Nivo). Following treatment with IL2-Nivo, cell surface PD-1 levels were significantly reduced, with a Dmax of 86.7%, compared to nivolumab isotype control (Extended Data FIG. 10b) FIG. 23B. This data demonstrates the generalizability of KineTACs to successfully co-opt alternative cytokine receptors, such as the interleukin receptor class CD25 is part of, for targeted protein degradation. Together, these data demonstrate that our KineTACs are exquisitely selective, degrading only the target protein.

### Example 10: Materials and Methods

[0227] This Example describes the materials and methods used in the Examples described above.

[0228] Cell lines: Cell lines were grown and maintained in T75 (Thermo Fisher Scientific) flasks at 37° C. and 5% CO₂. MDA-MB-231, MDA-MB-175VII, and MDA-MB-361 cells were grown in DMEM supplemented with 10% fetal bovine serum (FBS) and 1% penicillin/streptomycin. HeLa cells were grown in EMEM supplemented with 10% FBS and 1% penicillin/streptomycin. MCF-7 cells were grown in RPMI-1640 supplemented with 10% FBS and 1% penicillin/streptomycin. SK-BR-3 cells were grown in McCoy's 5A supplemented with 10% FBS and 1% penicillin/streptomycin.

[0229] Protein expression: Fabs were expressed in E. coli C43(DE3) Pro+ grown in an optimized TB autoinduction media at 37° C. for 6 hrs, then cooled to 30° C. for 18 hrs, and purified by Protein A affinity chromatography. IgGs and bispecifics were expressed and purified from Expi293 BirA cells using transient transfection (Expifectamine, Thermo Fisher Scientific). Enhancers were added 20 hrs after transfection. Cells were incubated for 5 days at 37° C. and 8% CO₂. Media was then harvested by centrifugation at 4,000×g for 20 min. IgGs were purified by Protein A affinity chromatography and buffer exchanged into PBS by spin concentration and flash frozen for storage at −80° C. Bispecifics were purified by Ni-NTA affinity chromatography and buffer exchanged into PBS containing 20% glycerol, concentrated, and flash frozen for storage at −80° C. Purity and integrity of all proteins were assessed by SDS-PAGE.

[0230] Bio-layer interferometry: Bio-layer interferometry (BLI) data were measured using an Octet RED384 (ForteBio) instrument. Biotinylated antigens were immobilized on a streptavidin biosensor and loaded until 0.4 nm signal was achieved. After blocking with 10 μM biotin, purified antibodies in solution was used as the analyte. PBSTB was used for all buffers. Data were analyzed using the ForteBio Octet analysis software and kinetic parameters were determined using a 1:1 monovalent binding model.

[0231] Degradation experiments: Cells were plated in 6- or 12-well plates and grown to ˜70% confluency before treatment. Media was aspirated and cells were treated with bispecifics or control antibodies in complete growth medium. After incubation at 37° C. for the designated time point, cells were washed with phosphate-buffered saline (PBS), lifted with versene, and harvested by centrifugation at 300×g for 5 min at 4° C. Samples were then tested by western blotting or flow cytometry to quantify protein levels.

[0232] Western blotting: Cell pellets were lysed with 1× RIPA buffer containing cOmplete mini protease inhibitor cocktail (Sigma-Aldrich) at 4° C. for 40 min. Lysates were centrifuged at 16,000×g for 10 min at 4° C. and protein concentrations were normalized using BCA assay (Pierce). 4× NuPAGE LDS sample buffer (Invitrogen) and 2-mercaptoethanol (BME) was added to the lysates and boiled for 10 min. Equal amounts of lysates were loaded onto a 4-12% Bis-Tris gel and ran at 200V for 37 min. The gel was incubated in 20% ethanol for 10 min and transferred onto a polyvinylidene difluoride (PVDF) membrane. The membrane was blocked in PBS with 0.1% Tween-20+5% bovine serum albumin (BSA) for 30 min at room temperature with gentle shaking. Membranes were incubated overnight with primary antibodies at respective dilutions at 4° C. with gentle shaking in PBS+0.2% Tween-20+5% BSA. Membranes were washed four times with tris-buffered saline (TBS)+0.1% Tween-20 and then co-incubated with HRP-anti-rabbit IgG (Cell Signaling Technologies, 7074A, 1:2000) and 680RD goat anti-mouse IgG (LI-COR, 926-68070, 1:10000) in PBS+0.2% Tween-20+5% BSA for 1 hr at room temperature. Membranes were washed four times with TBS+0.1% Tween-20, then washed with PBS. Membranes were imaged using an OdysseyCLxImager (L1-COR). SuperSignal West Pico PLUS Chemiluminescent Substrate (Thermo Fisher Scientific) was then added and imaged using a ChemiDoc Imager (BioRad). Band intensities were quantified using Image Studio Software (L1-COR).

[0233] Flow cytometry: Cell pellets were washed with cold PBS and centrifuged at 300×g for 5 min. Cells were blocked with cold PBS+3% BSA and centrifuged (300×g for 5 min). Cells were incubated with primary antibodies diluted in PBS+3% BSA for 30 min at 4° C. Cells were washed three times with cold PBS+3% BSA and secondary antibodies (if applicable) diluted in PBS+3% BSA added and incubated for 30 min at 4° C. Cells were washed three times with cold PBS+3% BSA and resuspended in cold PBS. Flow cytometry was performed on a CytoFLEX cytometer (Beckman Coulter) and gating was performed on single cells and live cells before acquisition of 10,000 cells. Analysis was performed using the FlowJo software package.

[0234] siRNA knockdown: HeLa cells were plated in a 6-well plate and grown to confluency. Cells were transfected with 20 pmol of siRNA (ON-TARGETplus siRNA SMARTPool, Dharmacon) and DharmaFECT 4 reagent (Dharmacon) according to manufacturer's instruction. Cells were incubated for 48 hrs at 37° C. under 5% CO₂ and siRNA knockdown was validated by western blotting.

[0235] Cell culture/SILAC labeling and treatment: MDA-MB-231 cells were grown in DMEM for SILAC (Thermo Fisher) with 10% dialyzed FBS (Gemini). Media was also supplemented with either light L-[12C6,14N2] lysine/L-[12C6,14N4] arginine (Sigma) or heavy L-[13C6,15N2] lysine/L-[13C6,15N4] arginine (Cambridge Isotope Laboratories, Tewksbury, MA). Cells were maintained in SILAC media for five passages to ensure complete isotopic labeling. Cells were then treated with either PBS control or 100 nM bispecific for 48 hours before cells were collected and heavy/light-labeled cells mixed at a 1:1 ratio in both forward and reverse mode. A small portion of these cells were set aside for whole cell proteomic analysis, and the remainder were used to prepare surface proteome enrichment.

[0236] Mass spectrometry sample preparation: Cell surface glycoproteins were captured largely as previously described, but using a modified protocol to facilitate small sample input. Briefly, cells were first washed in PBS, pH 6.5 before the glycoproteins were oxidized with 1.6 mM NaIO₄ (Sigma) in PBS, pH 6.5 for 20 minutes at 4° C. Cells were then biotinylated via the oxidized vicinal diols with 1 mM biocytin hydrazide (Biotium) in the presence of 10 mM aniline (Sigma) in PBS, pH 6.5 for 90 minutes at 4° C. Cell pellets were lysed with a 2× dilution of commercial RIPA buffer (Millipore) supplemented with 1× Protease Inhibitor Cocktail (Sigma) and 2 mM EDTA (Sigma) for 10 minutes at 4° C. Cells were further disrupted with probe sonication and the cell lysates were then incubated with NeutrAvidin coated agarose beads (Thermo) in Poly-Prep chromatography columns (Bio-Rad) for two hours at 4° C. to isolate biotinylated glycoproteins. After this incubation, cells were washed sequentially with 1× RIPA (Millipore) plus 1 mM EDTA, high salt PBS (PBS pH 7.4, 2 M NaCl [Sigma]), and denaturing urea buffer (50 mM ammonium bicarbonate, 2 M Urea). All wash buffers were heated to 42° C. prior to use. Proteins on the beads were next digested and desalted using the Preomics iST mass spectrometry sample preparation kit (Preomics) per the manufacturer's recommendations with few modifications. First, samples were resuspended in the “LYSE” solution and transferred to fresh tubes. After incubating in “LYSE” for 10 minutes at 55° C., the “DIGEST” solution was added and beads incubated for 90 minutes at 37° C. with mixing at 500 rpm. Following on-bead digest, the peptide eluate was isolated using SnapCap spin columns (Pierce) and the “STOP” solution added. The sample was then transferred to the Preomics cartridge and desalted using the manufacturer's protocol. Samples were dried, resuspended in 0.1% formic acid, 2% acetonitrile (Fisher), and quantified using the Pierce Peptide Quantification Kit prior to LC-MS/MS analysis. Whole cell lysate samples were prepared using the Preomics kit protocol for whole lysate samples. Resulting peptides were dried and quantified in the same manner as the surface enriched samples.

[0237] Mass spectrometry: LC-MS/MS was performed using a Bruker NanoElute chromatography system coupled to a Bruker timsTOF Pro mass spectrometer. Peptides were separated using a pre-packed IonOpticks Aurora (25 cm×75 μm) C18 reversed phase column (1.6 μm pore size, Thermo) fitted with a CaptiveSpray emitter for the timsTOF Pro CaptiveSpray source. For all samples, 200 ng of resuspended peptides were injected and separated using a linear gradient of 2-23% solvent B (solvent A: 0.1% formic acid+2% acetonitrile, solvent B: acetonitrile with 0.1% formic acid) over 90 minutes at 400 μL/minute with a final ramp to 34% B over 10 minutes. Separations were performed at a column temperature of 50° C. Data-dependent acquisition was performed using a timsTOF PASEF MS/MS method (TIMS mobility scan range 0.70-1.50 V·s/cm²; mass scan range 100-1700 m/z; ramp time 100 milliseconds; 10 PASEF scans per 1.17 seconds; active exclusion 24 seconds; charge range 0-5; minimum MS1 intensity 500). The normalized collision energy was set at 20.

[0238] Data analysis/Statistics: SILAC proteomics data were analyzed using PEAKSOnline (v1.4). For all samples, searches were performed with a precursor mass error tolerance of 20 ppm and a fragment mass error tolerance of 0.03 Da. The digest was considered to be semi-specific and up to 3 missed cleavages were allowed. For whole cell proteome data, the reviewed SwissProt database for the human proteome (downloaded Dec. 12, 2020) was used. For surface enriched samples, a database composed of SwissProt proteins annotated “membrane” but not “nuclear” or “mitochondrial” was used to ensure accurate unique peptide identification for surface proteins, as previously described. Carbamidomethylation of cystine was used as a fixed modification, whereas the isotopic labels for arginine and lysine, acetylation of the N-terminus, oxidation of methionine, and deamidation of asparagine and glutamine were set as variable modifications. Only PSMs and protein groups with an FDR of less than 1% were considered for downstream analysis. SILAC analysis was performed using the forward and reverse samples, and at least 2 labels for the ID and features were required. Proteins showing a >2-fold change from PBS control with a significance of P<0.01 were considered to be significantly changed.

[0239] Cell viability experiments: Cell viability assays were performed using an MTT modified assay. In brief, on day 0 15,000 MDA-MB-175VII, 7,000 NCI-H358, 2,000 HCC4006 and SK-BR-3 cells were plated in each well of a 96-well plate. On day 1, bispecifics or control antibodies were added in a dilution series. Cells were incubated at 37° C. under 5% CO₂ for 5 days. On day 6, 40 μL of 2.5 mg/mL thiazolyl blue tetrazolium bromide (GoldBio) was added to each well and incubated at 37° C. under 5% CO₂ for 4 hrs. 100 μL of 10% SDS in 0.01M HCl was then added to lyse cells and release MTT product. After 4 hrs at room temperature, absorbance at 600 nm was quantified using an Infinite M200 PRO plate reader (Tecan). Data was plotted using GraphPad Prism software (version 9.0) and curves were generated using non-linear regression with sigmoidal 4PL parameters.

[0240] Primary human CD8+ T cell isolation: Primary human T cells were isolated from leukoreductin chamber residuals following Trima Apheresis (Blood Centers of the Pacific) using established protocols.⁴⁸ Briefly, peripheral blood mononuclear cells (PBMCs) were isolated using Ficoll separation in SepMate tubes (STEMCELL Technologies) according to manufacturer's instructions. CD8+ T cells were isolated from PBMCs using the EasySep™ Human CD8+ T cell Isolation Kit following the manufacturer's protocol. Isolated cell populations were then analyzed for purity by flow cytometry on a Beckman Coulter CytoFlex flow cytometer using a panel of antibodies (anti-CD3, anti-CD4, anti-CD8a, all from BioLegend).

[0241] CD8+ T cell activation: Following CD8+ T cell isolation, cells were stimulated with recombinant IL-2 (GoldBio), IL-15 (GoldBio), and ImmunoCult Human CD3/CD28 T cell Activation (STEMCELL Technologies) for 4 days at 37° C. Activated CD8+ T cells were then analyzed for the upregulation of activation markers CD25 and PD-1 by flow cytometry using anti-CD25 and anti-PD-1 antibodies (BioLegend). Once activation was confirmed, cells were dosed as described above and levels of target protein analyzed by flow cytometry.

[0242] Flow cytometry for soluble ligand uptake: Cell pellets were washed three times with cold PBS and centrifuged at 300×g for 5 min. Cells were then resuspended in cold PBS. Flow cytometry was performed on a CytoFLEX cytometer (Beckman Coulter) and gating was performed on single cells and live cells before acquisition of 10,000 cells. Analysis was performed using the FlowJo software package.

[0243] Trypsin lift for soluble ligand uptake: Cell pellets were washed three times with cold PBS and centrifuged at 300×g for 5 min. Cells were then resuspended in cold PBS. Flow cytometry was performed on a CytoFLEX cytometer (Beckman Coulter) and gating was performed on single cells and live cells before acquisition of 10,000 cells. Analysis was performed using the FlowJo software package.

[0244] Confocal microscopy: Cells were plated onto Mat-Tek 35 mm glass bottom petri dishes pre-treated with poly-D-lysine and grown to ˜70% confluency before treatment. Media was aspirated and cells were treated with bispecifics or control antibodies in complete growth medium. For soluble ligand uptake experiments, biotinylated soluble ligand was pre-incubated with streptavidin-647 at 37° C. for 30 min, then mixed with bispecific or control antibodies and added to cells. After 24 hr incubation at 37° C., media was aspirated, and cells were washed with PBS. Cells were then stained using standard protocols for LysoTracker Deep Red (Invitrogen), DAPI (Cell Signaling Technologies), and primary antibody. Samples were imaged using a Nikon Ti Microscope with Yokogawa CSU-22 spinning disk confocal and a 100× objective lens. 405, 488, and 647 nm lasers were used to image DAPI, primary antibody, and LysoTracker, respectively. Images were deconvoluted and processed using NIS-Element and FIJI software packages.

[0245] Antibody in vivo stability study: Male nude nu/nu mice (8-10 weeks old, bred at the UCSF MZ Breeding Facility) were treated with 5, 10, or 15 mg/kg CXCL12-Tras via intravenous injection (3 mice per group). Blood was collected from the lateral saphenous vein using EDTA capillary tubes at day 0 prior to intravenous injection and at days 3, 5, 7, and 10 post injection. Plasma was separated after centrifugation at 700×g at 4° C. for 15 min. To determine the levels of CXCL12-Tras, 1 μL of plasma was diluted into 30 μL of NuPAGE LDS sample buffer (Invitrogen) and loaded onto a 4-12% Bis-Tris gel and ran at 200V for 37 mi. The gel was incubated in 20% ethanol for 10 min and transferred onto a polyvinylidene difluoride (PVDF) membrane. The membrane was washed with water followed by incubation for 5 mi with REVERT 700 Total Protein Stain (L1-COR). The blot was then washed twice with REVERT 700 Wash Solution (L1-COR) and imaged using an OdysseyCLxmager (L1-COR). The membrane was then blocked in PBS with 0.1% Tween-20+5% bovine serum albumin (BSA) for 30 m at room temperature with gentle shaking. Membranes were incubated overnight with 800 CW goat ant-human IgG (L1-COR, 1:10000) at 4° C. with gentle shaking in PBS+0.2% Tween-20+5% BSA. Membranes were washed four times with tris-buffered saline (TBS)+0.1% Tween-20 and then washed with PBS. Membranes were imaged using an OdysseyCLxImager (L1-COR). Band intensities were quantified using Image Studio Software (L1-COR).

[0246] Antibodies and conditions used in the Examples related to the present disclosure are provided below in Table 6.

TABLE 6
Antibodies and usage conditions

| Antibody | Source (Cat. #) | Usage, Dilution |
|---|---|---|
| Rabbit anti-PD-L1 | Cell Signaling Technologies | WB, 1:1000 |
| | (13684S) | |
| Rabbit anti-EGFR | Cell Signaling Technologies | WB, 1:1000 |
| | (4267S) | |
| Rabbit anti-HER2 | Cell Signaling Technologies | WB, 1:1000 |
| | (4290S) | |
| Rabbit anti-CDCP1 | Cell Signaling Technologies | WB, 1:1000 |
| | (13794S) | |
| Mouse anti-Tubulin | Cell Signaling Technologies | WB, 1:1600 |
| | (3873S) | |
| Mouse anti-β-Actin | Cell Signaling Technologies | WB, 1:1000 |
| | (3700S) | |
| Rabbit anti-CXCR7 | Abcam (ab138509) | WB, 1:1000 |
| Rabbit anti-CXCR4 | Abcam (ab124824) | WB, 1:1000 |
| 680RD Goat anti-Mouse IgG | LI-COR (926-68070) | WB, 1:10000 |
| 800CW Goat anti-Rabbit IgG | LI-COR (926-32211) | WB, 1:10000 |
| HRP anti-Rabbit IgG | Cell Signaling Technologies | WB, 1:2000 |
| | (7074A) | |
| Rabbit anti-PD-L1 Alexa 488 | Cell Signaling Technologies | IF, 1:50 |
| Conjugate | (25048S) | |
| Rabbit anti-EGFR Alexa 488 | Cell Signaling Technologies | IF, 1:100 |
| Conjugate | (5616S) | |
| Rabbit anti-EGFR Alexa 647 | Cell Signaling Technologies | IF, 1:50 |
| Conjugate | (5588S) | |
| Rabbit anti-PD-L1 Alexa 647 | Cell Signaling Technologies | FC, 1:50; IF, 1:400 |
| Conjugate | (41726S) | |
| Rabbit IgG Isotype Control | Cell Signaling Technologies | FC, 1:50 |
| Alexa 647 Conjugate | (3452S) | |
| Cetuximab | Selleck Chemicals (A2000) | Functional |

### Example 11: Other Chemokines, Cytokines, and Growth Factors Useful as KineTACS

[0247] This Example describes the expansion of KineTACS beyond CXCL12, CXCL11, vMIPII, and IL2.

[0248] First, 100,000 cells were incubated for 24 hrs at 37° C. in 500 μL conditioned media containing control compounds or KineTACs and VEGF647. 100 nM biotinylated VEGF was added to 200 nM SA647 and allowed to bind for 15 mins at 37° C. KineTACs (CXCL12, CCL2, IL21, CXCL8, CX3CL1, vCXC-1, CCL16, IL4, IFNA, FGF21) were then added for a final concentration of 25 nM KineTAC and 50 nM VEGF647. The mixture was then immediately dosed onto cells and allowed to incubate for 24 hrs at 37° C. before harvesting by centrifugation at 1000×g, washing 3× with PBS, and performing flow cytometry. Plots were gated for live and singlet cells and the median fluorescence intensity (MFI) in the APC channel was used to quantify the ability of the KineTAC to mediate VEGF647 uptake. Fold change was measured over solely VEGF647 alone (FIG. 29). Next, 100,000 cells were incubated for 24 hrs at 37° C. in 500 μL conditioned media containing control compounds or KineTACs and VEGF647. 100 nM biotinylated VEGF was added to 200 nM SA-pHrodoRed conjugate and allowed to bind for 15 mins at 37° C. KineTACs (CCL2, vMIP-II, CXCL12, CX3CL1, and IFNA) were then added to VEGF-pHrodoRed for a final concentration of 25 nM KineTAC and 50 nM VEGF-pHrodoRed. pHrodo Red is a pH sensitive dye that fluorescenes under acidic conditions. Thus, this dye was used to determine whether VEGF was being localized with acidic compartments, such as the lysosome and late endosome, after KineTAC treatment. The mixture was then immediately dosed onto cells and allowed to incubate for 24 hrs at 37° C. before harvesting by centrifugation at 1000×g, washing 3× with PBS, and performing flow cytometry. Plots were gated for live and singlet cells and MFI in the PE channel was used to quantify the ability of the KineTAC to mediate VEGF-pHrodoRed uptake. Fold change was measured over VEGF-pHrodoRed alone (FIG. 30). It was also found that CCL20 exhibited a 40% increase in VEGF uptake as compared to control.

[0249] The data does show that in most cases, VEGF is localized to an acidic intracellular compartment, such as the lysosome or late endosome, as a result of KineTAC treatment. This occurs within 24 hrs and is greater than VEGF alone (FIGS. 29-30). The constructs produced and purified tend to direct a fluorescently labeled VEGF onto or inside of cells within 24 hrs.

[0250] Some constructs shown below in Table 7 have been generated and successfully expressed. The remainder will be completed. All of these constructs will be tested using protocols described in Example 12.

TABLE 7

| Con- | | | SEQ |
|---|---|---|---|
| struct | | | ID |
| Name | | Construct Sequence | NO |
| vCXC-1 | Knob: | MRLIFGALIIFLAYVYHYEVNGTELRCRCL | |
| | | HRKWPPNKIILGNYWLHRDPRGPGCDKNEH | |
| | | LLYPDGRKPPGPGVCLSPDHLFSKWLDKHN | |
| | | DNRWYNVNITKSPGPRRINITLIGVRGEPK | |
| | | SCDKTHTCPPCPAPELLGGPSVFLFPPKPK | |
| | | DTLMISRTPEVTCVVVDVSHEDPEVKFNWY | |
| | | VDGVEVHNAKTKPREEQYGSTYRVVSVLTV | |
| | | LHQDWLNGKEYKCKVSNKALPAPIEKTISK | |
| | | AKGQPREPQVYTLPPSRDELTKNQVSLWCL | |
| | | VKGFYPSDIAVEWESNGQPENNYKTTPPVL | |
| | | DSDGSFFLYSKLTVDKSRWQQGNVFSCSVM | |
| | | HEALHNHYTQKSLSLSPGKGGSHHHHHH | |
| | Hole: | EVQLVESGGGLVQPGGSLRLSCAASGYTFT | |
| | | NYGMNWVRQAPGKGLEWVGWINTYTGEPTY | |
| | | AADFKRRFTFSLDTSKSTAYLQMNSLRAED | |
| | | TAVYYCAKYPHYYGSSHWYFDVWGQGTLVT | |
| | | VSSASTKGPSVFPLAPSSKSTSGGTAALGC | |
| | | LVKDYFPEPVTVSWNSGALTSGVHTFPAVL | |
| | | QSSGLYSLSSVVTVPSSSLGTQTYICNVNH | |
| | | KPSNTKVDKKVEPKSCDKTHTCPPCPAPEL | |
| | | LGGPSVFLFPPKPKDTLMISRTPEVTCVVV | |
| | | DVSHEDPEVKFNWYVDGVEVHNAKTKPREE | |
| | | QYGSTYRVVSVLTVLHQDWLNGKEYKCKVS | |
| | | NKALPAPIEKTISKAKGQPREPQVYTLPPS | |
| | | RDELTKNQVSLSCAVKGFYPSDIAVEWESN | |
| | | GQPENNYKTTPPVLDSDGSFFLVSKLTVDK | |
| | | SRWQQGNVFSCSVMHEALHNHYTQKSLSLS | |
| | | PGKGGSGAWSHPQFEK | |
| | L: | DIQMTQSPSSLSASVGDRVTITCSASQDIS | |
| | | NYLNWYQQKPGKAPKVLIYFTSSLHSGVPS | |
| | | RFSGSGSGTDFTLTISSLQPEDFATYYCQQ | |
| | | YSTVPWTFGQGTKVEIKRTVAAPSVFIFPP | |
| | | SDEQLKSGTASVVCLLNNFYPREAKVQWKV | |
| | | DNALQSGNSQESVTEQDSKDSTYSLSSTLT | |
| | | LSKADYEKHKVYACEVTHQGLSSPVTKSFN | |
| | | RGEC | |
| vMIP-II | Knob: | GDTLGASWHRPDKCCLGYQKRPLPQVLLSS | |
| | | WYPTSQLCSKPGVIFLTKRGRQVCADKSKD | |
| | | WVKKLMQQLPVTAREPKSCDKTHTCPPCPA | |
| | | PELLGGPSVFLFPPKPKDTLMISRTPEVTC | |
| | | VVVDVSHEDPEVKFNWYVDGVEVHNAKTKP | |
| | | REEQYGSTYRVVSVLTVLHQDWLNGKEYKC | |
| | | KVSNKALPAPIEKTISKAKGQPREPQVYTL | |
| | | PPSRDELTKNQVSLWCLVKGFYPSDIAVEW | |
| | | ESNGQPENNYKTTPPVLDSDGSFFLYSKLT | |
| | | VDKSRWQQGNVFSCSVMHEALHNHYTQKSL | |
| | | SLSPGKGGSHHHHHH | |
| | Hole: | EVQLVESGGGLVQPGGSLRLSCAASGYTFT | |
| | | NYGMNWVRQAPGKGLEWVGWINTYTGEPTY | |
| | | AADFKRRFTFSLDTSKSTAYLQMNSLRAED | |
| | | TAVYYCAKYPHYYGSSHWYFDVWGQGTLVT | |
| | | VSSASTKGPSVFPLAPSSKSTSGGTAALGC | |
| | | LVKDYFPEPVTVSWNSGALTSGVHTFPAVL | |
| | | QSSGLYSLSSVVTVPSSSLGTQTYICNVNH | |
| | | KPSNTKVDKKVEPKSCDKTHTCPPCPAPEL | |
| | | LGGPSVFLFPPKPKDTLMISRTPEVTCVVV | |
| | | DVSHEDPEVKFNWYVDGVEVHNAKTKPREE | |
| | | QYGSTYRVVSVLTVLHQDWLNGKEYKCKVS | |
| | | NKALPAPIEKTISKAKGQPREPQVYTLPPS | |
| | | RDELTKNQVSLSCAVKGFYPSDIAVEWESN | |
| | | GQPENNYKTTPPVLDSDGSFFLVSKLTVDK | |
| | | SRWQQGNVFSCSVMHEALHNHYTQKSLSLS | |
| | | PGKGGSGAWSHPQFEK | |
| | L: | DIQMTQSPSSLSASVGDRVTITCSASQDIS | |
| | | NYLNWYQQKPGKAPKVLIYFTSSLHSGVPS | |
| | | RFSGSGSGTDFTLTISSLQPEDFATYYCQQ | |
| | | YSTVPWTFGQGTKVEIKRTVAAPSVFIFPP | |
| | | SDEQLKSGTASVVCLLNNFYPREAKVQWKV | |
| | | DNALQSGNSQESVTEQDSKDSTYSLSSTLT | |
| | | LSKADYEKHKVYACEVTHQGLSSPVTKSFN | |
| | | RGEC | |
| U83 | Knob: | MAIGFICSSPDAELFSEKSRMSSSVLLGCL | |
| | | LCCMDWSAAVPGKTEPFRKLFDAIMIKKLK | |
| | | SCSAAYPSDLDEGSMCDMADASPTSLELGL | |
| | | SKLDKESEPKSCDKTHTCPPCPAPELLGGP | |
| | | SVFLFPPKPKDTLMISRTPEVTCVVVDVSH | |
| | | EDPEVKFNWYVDGVEVHNAKTKPREEQYGS | |
| | | TYRVVSVLTVLHQDWLNGKEYKCKVSNKAL | |
| | | PAPIEKTISKAKGQPREPQVYTLPPSRDEL | |
| | | TKNQVSLWCLVKGFYPSDIAVEWESNGQPE | |
| | | NNYKTTPPVLDSDGSFFLYSKLTVDKSRWQ | |
| | | QGNVFSCSVMHEALHNHYTQKSLSLSPGKG | |
| | | GSHHHHHH | |
| | Hole: | EVQLVESGGGLVQPGGSLRLSCAASGYTFT | |
| | | NYGMNWVRQAPGKGLEWVGWINTYTGEPTY | |
| | | AADFKRRFTFSLDTSKSTAYLQMNSLRAED | |
| | | TAVYYCAKYPHYYGSSHWYFDVWGQGTLVT | |
| | | VSSASTKGPSVFPLAPSSKSTSGGTAALGC | |
| | | LVKDYFPEPVTVSWNSGALTSGVHTFPAVL | |
| | | QSSGLYSLSSVVTVPSSSLGTQTYICNVNH | |
| | | KPSNTKVDKKVEPKSCDKTHTCPPCPAPEL | |
| | | LGGPSVFLFPPKPKDTLMISRTPEVTCVVV | |
| | | DVSHEDPEVKFNWYVDGVEVHNAKTKPREE | |
| | | QYGSTYRVVSVLTVLHQDWLNGKEYKCKVS | |
| | | NKALPAPIEKTISKAKGQPREPQVYTLPPS | |
| | | RDELTKNQVSLSCAVKGFYPSDIAVEWESN | |
| | | GQPENNYKTTPPVLDSDGSFFLVSKLTVDK | |
| | | SRWQQGNVFSCSVMHEALHNHYTQKSLSLS | |
| | | PGKGGSGAWSHPQFEK | |
| | L: | DIQMTQSPSSLSASVGDRVTITCSASQDIS | |
| | | NYLNWYQQKPGKAPKVLIYFTSSLHSGVPS | |
| | | RESGSGSGTDFTLTISSLQPEDFATYYCQQ | |
| | | YSTVPWTFGQGTKVEIKRTVAAPSVFIFPP | |
| | | SDEQLKSGTASVVCLLNNFYPREAKVQWKV | |
| | | DNALQSGNSQESVTEQDSKDSTYSLSSTLT | |
| | | LSKADYEKHKVYACEVTHQGLSSPVTKSFN | |
| | | RGEC | |
| IL-3 | Knob: | APMTQTTPLKTSWVNCSNMIDEIITHLKQP | |
| | | PLPLLDENNLNGEDQDILMENNLRRPNLEA | |
| | | FNRAVKSLQNASAIESILKNLLPCLPLATA | |
| | | APTRHPIHIKDGDWNEFRRKLTFYLKTLEN | |
| | | AQAQQTTLSLAIFEPKSCDKTHTCPPCPAP | |
| | | ELLGGPSVFLFPPKPKDTLMISRTPEVTCV | |
| | | VVDVSHEDPEVKFNWYVDGVEVHNAKTKPR | |
| | | EEQYGSTYRVVSVLTVLHQDWLNGKEYKCK | |
| | | VSNKALPAPIEKTISKAKGQPREPQVYTLP | |
| | | PSRDELTKNQVSLWCLVKGFYPSDIAVEWE | |
| | | SNGQPENNYKTTPPVLDSDGSFFLYSKLTV | |
| | | DKSRWQQGNVFSCSVMHEALHNHYTQKSLS | |
| | | LSPGKGGSHHHHHH | |
| | Hole: | EVQLVESGGGLVQPGGSLRLSCAASGYTFT | |
| | | NYGMNWVRQAPGKGLEWVGWINTYTGEPTY | |
| | | AADFKRRFTFSLDTSKSTAYLQMNSLRAED | |
| | | TAVYYCAKYPHYYGSSHWYFDVWGQGTLVT | |
| | | VSSASTKGPSVFPLAPSSKSTSGGTAALGC | |
| | | LVKDYFPEPVTVSWNSGALTSGVHTFPAVL | |
| | | QSSGLYSLSSVVTVPSSSLGTQTYICNVNH | |
| | | KPSNTKVDKKVEPKSCDKTHTCPPCPAPEL | |
| | | LGGPSVFLFPPKPKDTLMISRTPEVTCVVV | |
| | | DVSHEDPEVKFNWYVDGVEVHNAKTKPREE | |
| | | QYGSTYRVVSVLTVLHQDWLNGKEYKCKVS | |
| | | NKALPAPIEKTISKAKGQPREPQVYTLPPS | |
| | | RDELTKNQVSLSCAVKGFYPSDIAVEWESN | |
| | | GQPENNYKTTPPVLDSDGSFFLVSKLTVDK | |
| | | SRWQQGNVFSCSVMHEALHNHYTQKSLSLS | |
| | | PGKGGSGAWSHPQFEK | |
| | L: | DIQMTQSPSSLSASVGDRVTITCSASQDIS | |
| | | NYLNWYQQKPGKAPKVLIYFTSSLHSGVPS | |
| | | RFSGSGSGTDFTLTISSLQPEDFATYYCQQ | |
| | | YSTVPWTFGQGTKVEIKRTVAAPSVFIFPP | |
| | | SDEQLKSGTASVVCLLNNFYPREAKVQWKV | |
| | | DNALQSGNSQESVTEQDSKDSTYSLSSTLT | |
| | | LSKADYEKHKVYACEVTHQGLSSPVTKSFN | |
| | | RGEC | |
| IL-4 | Knob: | HKCDITLQEIIKTLNSLTEQKTLCTELTVT | |
| | | DIFAASKNTTEKETFCRAATVLRQFYSHHE | |
| | | KDTRCLGATAQQFHRHKQLIRFLKRLDRNL | |
| | | WGLAGLNSCPVKEANQSTLENFLERLKTIM | |
| | | REKYSKCSSEPKSCDKTHTCPPCPAPELLG | |
| | | GPSVFLFPPKPKDTLMISRTPEVTCVVVDV | |
| | | SHEDPEVKFNWYVDGVEVHNAKTKPREEQY | |
| | | GSTYRVVSVLTVLHQDWLNGKEYKCKVSNK | |
| | | ALPAPIEKTISKAKGQPREPQVYTLPPSRD | |
| | | ELTKNQVSLWCLVKGFYPSDIAVEWESNGQ | |
| | | PENNYKTTPPVLDSDGSFFLYSKLTVDKSR | |
| | | WQQGNVFSCSVMHEALHNHYTQKSLSLSPG | |
| | | KGGSHHHHHH | |
| | Hole: | EVQLVESGGGLVQPGGSLRLSCAASGYTFT | |
| | | NYGMNWVRQAPGKGLEWVGWINTYTGEPTY | |
| | | AADFKRRFTFSLDTSKSTAYLQMNSLRAED | |
| | | TAVYYCAKYPHYYGSSHWYFDVWGQGTLVT | |
| | | VSSASTKGPSVFPLAPSSKSTSGGTAALGC | |
| | | LVKDYFPEPVTVSWNSGALTSGVHTFPAVL | |
| | | QSSGLYSLSSVVTVPSSSLGTQTYICNVNH | |
| | | KPSNTKVDKKVEPKSCDKTHTCPPCPAPEL | |
| | | LGGPSVFLFPPKPKDTLMISRTPEVTCVVV | |
| | | DVSHEDPEVKFNWYVDGVEVHNAKTKPREE | |
| | | Q | |
| | | YGSTYRVVSVLTVLHQDWLNGKEYKCKVSN | |
| | | KALPAPIEKTISKAKGQPREPQVYTLPPSR | |
| | | DELTKNQVSLSCAVKGFYPSDIAVEWESNG | |
| | | QPENNYKTTPPVLDSDGSFFLVSKLTVDKS | |
| | | RWQQGNVFSCSVMHEALHNHYTQKSLSLSP | |
| | | GKGGSGAWSHPQFEK | |
| | L: | DIQMTQSPSSLSASVGDRVTITCSASQDIS | |
| | | NYLNWYQQKPGKAPKVLIYFTSSLHSGVPS | |
| | | RFSGSGSGTDFTLTISSLQPEDFATYYCQQ | |
| | | YSTVPWTFGQGTKVEIKRTVAAPSVFIFPP | |
| | | SDEQLKSGTASVVCLLNNFYPREAKVQWKV | |
| | | DNALQSGNSQESVTEQDSKDSTYSLSSTLT | |
| | | LSKADYEKHKVYACEVTHQGLSSPVTKSFN | |
| | | RGEC | |
| IL-5 | Knob: | IPTEIPTSALVKETLALLSTHRTLLIANET | |
| | | LRIPVPVHKNHQLCTEEIFQGIGTLESQTV | |
| | | QGGTVERLFKNLSLIKKYIDGQKKKCGEER | |
| | | RRVNQFLDYLQEFLGVMNTEWIIESEPKSC | |
| | | DKTHTCPPCPAPELLGGPSVFLFPPKPKDT | |
| | | LMISRTPEVTCVVVDVSHEDPEVKENWYVD | |
| | | GVEVHNAKTKPREEQYGSTYRVVSVLTVLH | |
| | | QDWLNGKEYKCKVSNKALPAPIEKTISKAK | |
| | | GQPREPQVYTLPPSRDELTKNQVSLWCLVK | |
| | | GFYPSDIAVEWESNGQPENNYKTTPPVLDS | |
| | | DGSFFLYSKLTVDKSRWQQGNVFSCSVMHE | |
| | | ALHNHYTQKSLSLSPGKGGSHHHHHH | |
| | Hole: | EVQLVESGGGLVQPGGSLRLSCAASGYTFT | |
| | | NYGMNWVRQAPGKGLEWVGWINTYTGEPTY | |
| | | AADFKRRFTFSLDTSKSTAYLQMNSLRAED | |
| | | TAVYYCAKYPHYYGSSHWYFDVWGQGTLVT | |
| | | VSSASTKGPSVFPLAPSSKSTSGGTAALGC | |
| | | LVKDYFPEPVTVSWNSGALTSGVHTFPAVL | |
| | | QSSGLYSLSSVVTVPSSSLGTQTYICNVNH | |
| | | KPSNTKVDKKVEPKSCDKTHTCPPCPAPEL | |
| | | LGGPSVFLFPPKPKDTLMISRTPEVTCVVV | |
| | | DVSHEDPEVKFNWYVDGVEVHNAKTKPREE | |
| | | QYGSTYRVVSVLTVLHQDWLNGKEYKCKVS | |
| | | NKALPAPIEKTISKAKGQPREPQVYTLPPS | |
| | | RDELTKNQVSLSCAVKGFYPSDIAVEWESN | |
| | | GQPENNYKTTPPVLDSDGSFFLVSKLTVDK | |
| | | SRWQQGNVFSCSVMHEALHNHYTQKSLSLS | |
| | | PGKGGSGAWSHPQFEK | |
| | L: | DIQMTQSPSSLSASVGDRVTITCSASQDIS | |
| | | NYLNWYQQKPGKAPKVLIYFTSSLHSGVPS | |
| | | RFSGSGSGTDFTLTISSLQPEDFATYYCQQ | |
| | | YSTVPWTFGQGTKVEIKRTVAAPSVFIFPP | |
| | | SDEQLKSGTASVVCLLNNFYPREAKVQWKV | |
| | | DNALQSGNSQESVTEQDSKDSTYSLSSTLT | |
| | | LSKADYEKHKVYACEVTHQGLSSPVTKSFN | |
| | | RGEC | |
| IL-6 | Knob: | VPPGEDSKDVAAPHRQPLTSSERIDKQIRY | |
| | | ILDGISALRKETCNKSNMCESSKEALAENN | |
| | | LNLPKMAEKDGCFQSGFNEETCLVKIITGL | |
| | | LEFEVYLEYLQNRFESSEEQARAVQMSTKV | |
| | | LIQFLQKKAKNLDAITTPDPTTNASLLTKL | |
| | | QAQNQWLQDMTTHLILRSFKEFLQSSLRAL | |
| | | RQMEPKSCDKTHTCPPCPAPELLGGPSVFL | |
| | | FPPKPKDTLMISRTPEVTCVVVDVSHEDPE | |
| | | VKFNWYVDGVEVHNAKTKPREEQYGSTYRV | |
| | | VSVLTVLHQDWLNGKEYKCKVSNKALPAPI | |
| | | EKTISKAKGQPREPQVYTLPPSRDELTKNQ | |
| | | VSLWCLVKGFYPSDIAVEWESNGQPENNYK | |
| | | TTPPVLDSDGSFFLYSKLTVDKSRWQQGNV | |
| | | FSCSVMHEALHNHYTQKSLSLSPGKGGSHH | |
| | | HHHH | |
| | Hole: | EVQLVESGGGLVQPGGSLRLSCAASGYTFT | |
| | | NYGMNWVRQAPGKGLEWVGWINTYTGEPTY | |
| | | AADFKRRFTFSLDTSKSTAYLQMNS | |
| | | LRAEDTAVYYCAKYPHYYGSSHWYFDVWGQ | |
| | | GTLVTVSSASTKGPSVFPLAPSSKSTSGGT | |
| | | AALGCLVKDYFPEPVTVSWNSGALTSGVHT | |
| | | FPAVLQSSGLYSLSSVVTVPSSSLGTQTYI | |
| | | CNVNHKPSNTKVDKKVEPKSCDKTHTCPPC | |
| | | PAPELLGGPSVFLFPPKPKDTLMISRTPEV | |
| | | TCVVVDVSHEDPEVKFNWYVDGVEVHNAKT | |
| | | KPREEQYGSTYRVVSVLTVLHQDWLNGKEY | |
| | | KCKVSNKALPAPIEKTISKAKGQPREPQVY | |
| | | TLPPSRDELTKNQVSLSCAVKGFYPSDIAV | |
| | | EWESNGQPENNYKTTPPVLDSDGSFFLVSK | |
| | | LTVDKSRWQQGNVFSCSVMHEALHNHYTQK | |
| | | SLSLSPGKGGSGAWSHPQFEK | |
| | L: | DIQMTQSPSSLSASVGDRVTITCSASQDIS | |
| | | NYLNWYQQKPGKAPKVLIYFTSSLHSGVPS | |
| | | RFSGSGSGTDFTLTISSLQPEDFATYYCQQ | |
| | | YSTVPWTFGQGTKVEIKRTVAAPSVFIFPP | |
| | | SDEQLKSGTASVVCLLNNFYPREAKVQWKV | |
| | | DNALQSGNSQESVTEQDSKDSTYSLSSTLT | |
| | | LSKADYEKHKVYACEVTHQGLSSPVTKSFN | |
| | | RGEC | |
| IL-7 | Knob: | DCDIEGKDGKQYESVLMVSIDQLLDSMKEI | |
| | | GSNCLNNEFNFFKRHICDANKEGMFLFRAA | |
| | | RKLRQFLKMNSTGDFDLHLLKVSEGTTILL | |
| | | NCTGQVKGRKPAALGEAQPTKSLEENKSLK | |
| | | EQKKLNDLCFLKRLLQEIKTCWNKILMGTK | |
| | | EHEPKSCDKTHTCPPCPAPELLGGPSVFLF | |
| | | PPKPKDTLMISRTPEVTCVVVDVSHEDPEV | |
| | | KFNWYVDGVEVHNAKTKPREEQYGSTYRVV | |
| | | SVLTVLHQDWLNGKEYKCKVSNKALPAPIE | |
| | | KTISKAKGQPREPQVYTLPPSRDELTKNQV | |
| | | SLWCLVKGFYPSDIAVEWESNGQPENNYKT | |
| | | TPPVLDSDGSFFLYSKLTVDKSRWQQGNVF | |
| | | SCSVMHEALHNHYTQKSLSLSPGKGGSHHH | |
| | | HHH | |
| | Hole: | EVQLVESGGGLVQPGGSLRLSCAASGYTFT | |
| | | NYGMNWVRQAPGKGLEWVGWINTYTGEPTY | |
| | | AADFKRRFTFSLDTSKSTAYLQMNSLRAED | |
| | | TAVYYCAKYPHYYGSSHWYFDVWGQGTLVT | |
| | | VSSASTKGPSVFPLAPSSKSTSGGTAALGC | |
| | | LVKDYFPEPVTVSWNSGALTSGVHTFPAVL | |
| | | QSSGLYSLSSVVTVPSSSLGTQTYICNVNH | |
| | | KPSNTKVDKKVEPKSCDKTHTCPPCPAPEL | |
| | | LGGPSVFLFPPKPKDTLMISRTPEVTCVVV | |
| | | DVSHEDPEVKFNWYVDGVEVHNAKTKPREE | |
| | | QYGSTYRVVSVLTVLHQDWLNGKEYKCKVS | |
| | | NKALPAPIEKTISKAKGQPREPQVYTLPPS | |
| | | RDELTKNQVSLSCAVKGFYPSDIAVEWESN | |
| | | GQPENNYKTTPPVLDSDGSFFLVSKLTVDK | |
| | | SRWQQGNVFSCSVMHEALHNHYTQKSLSLS | |
| | | PGKGGSGAWSHPQFEK | |
| | L: | DIQMTQSPSSLSASVGDRVTITCSASQDIS | |
| | | NYLNWYQQKPGKAPKVLIYFTSSLHSGVPS | |
| | | RFSGSGSGTDFTLTISSLQPEDFATYYCQQ | |
| | | YSTVPWTFGQGTKVEIKRTVAAPSVFIFPP | |
| | | SDEQLKSGTASVVCLLNNFYPREAKVQWKV | |
| | | DNALQSGNSQESVTEQDSKDSTYSLSSTLT | |
| | | LSKADYEKHKVYACEVTHQGLSSPVTKSFN | |
| | | RGEC | |
| IL-8 | Knob: | AKELRCQCIKTYSKPFHPKFIKELRVIESG | |
| | | PHCANTEIIVKLSDGRELCLDPKENWVQRV | |
| | | VEKFLKRAENSEPKSCDKTHTCPPCPAPEL | |
| | | LGGPSVFLFPPKPKDTLMISRTPEVTCVVV | |
| | | DVSHEDPEVKFNWYVDGVEVHNAKTKPREE | |
| | | QYGSTYRVVSVLTVLHQDWLNGKEYKCKVS | |
| | | NKALPAPIEKTISKAKGQPREPQVYTLPPS | |
| | | RDELTKNQVSLWCLVKGFYPSDIAVEWESN | |
| | | GQPENNYKTTPPVLDSDGSFF | |
| | | LYSKLTVDKSRWQQGNVFSCSVMHEALHNH | |
| | | YTQKSLSLSPGKGGSHHHHHH | |
| | Hole: | EVQLVESGGGLVQPGGSLRLSCAASGYTFT | |
| | | NYGMNWVRQAPGKGLEWVGWINTYTGEPTY | |
| | | AADFKRRFTFSLDTSKSTAYLQMNSLRAED | |
| | | TAVYYCAKYPHYYGSSHWYFDVWGQGTLVT | |
| | | VSSASTKGPSVFPLAPSSKSTSGGTAALGC | |
| | | LVKDYFPEPVTVSWNSGALTSGVHTFPAVL | |
| | | QSSGLYSLSSVVTVPSSSLGTQTYICNVNH | |
| | | KPSNTKVDKKVEPKSCDKTHTCPPCPAPEL | |
| | | LGGPSVFLFPPKPKDTLMISRTPEVTCVVV | |
| | | DVSHEDPEVKFNWYVDGVEVHNAKTKPREE | |
| | | QYGSTYRVVSVLTVLHQDWLNGKEYKCKVS | |
| | | NKALPAPIEKTISKAKGQPREPQVYTLPPS | |
| | | RDELTKNQVSLSCAVKGFYPSDIAVEWESN | |
| | | GQPENNYKTTPPVLDSDGSFFLVSKLTVDK | |
| | | SRWQQGNVFSCSVMHEALHNHYTQKSLSLS | |
| | | PGKGGSGAWSHPQFEK | |
| | L: | DIQMTQSPSSLSASVGDRVTITCSASQDIS | |
| | | NYLNWYQQKPGKAPKVLIYFTSSLHSGVPS | |
| | | RFSGSGSGTDFTLTISSLQPEDFATYYCQQ | |
| | | YSTVPWTFGQGTKVEIKRTVAAPSVFIFPP | |
| | | SDEQLKSGTASVVCLLNNFYPREAKVQWKV | |
| | | DNALQSGNSQESVTEQDSKDSTYSLSSTLT | |
| | | LSKADYEKHKVYACEVTHQGLSSPVTKSFN | |
| | | RGEC | |
| IL-9 | Knob: | QGCPTLAGILDINFLINKMQEDPASKCHCS | |
| | | ANVTSCLCLGIPSDNCTRPCFSERLSQMTN | |
| | | TTMQTRYPLIFSRVKKSVEVLKNNKCPYFS | |
| | | CEQPCNQTTAGNALTFLKSLLEIFQKEKMR | |
| | | GMRGKIEPKSCDKTHTCPPCPAPELLGGPS | |
| | | VFLFPPKPKDTLMISRTPEVTCVVVDVSHE | |
| | | DPEVKFNWYVDGVEVHNAKTKPREEQYGST | |
| | | YRVVSVLTVLHQDWLNGKEYKCKVSNKALP | |
| | | APIEKTISKAKGQPREPQVYTLPPSRDELT | |
| | | KNQVSLWCLVKGFYPSDIAVEWESNGQPEN | |
| | | NYKTTPPVLDSDGSFFLYSKLTVDKSRWQQ | |
| | | GNVFSCSVMHEALHNHYTQKSLSLSPGKGG | |
| | | SHHHHHH | |
| | Hole: | EVQLVESGGGLVQPGGSLRLSCAASGYTFT | |
| | | NYGMNWVRQAPGKGLEWVGWINTYTGEPTY | |
| | | AADFKRRFTFSLDTSKSTAYLQMNSLRAED | |
| | | TAVYYCAKYPHYYGSSHWYFDVWGQGTLVT | |
| | | VSSASTKGPSVFPLAPSSKSTSGGTAALGC | |
| | | LVKDYFPEPVTVSWNSGALTSGVHTFPAVL | |
| | | QSSGLYSLSSVVTVPSSSLGTQTYICNVNH | |
| | | KPSNTKVDKKVEPKSCDKTHTCPPCPAPEL | |
| | | LGGPSVFLFPPKPKDTLMISRTPEVTCVVV | |
| | | DVSHEDPEVKFNWYVDGVEVHNAKTKPREE | |
| | | QYGSTYRVVSVLTVLHQDWLNGKEYKCKVS | |
| | | NKALPAPIEKTISKAKGQPREPQVYTLPPS | |
| | | RDELTKNQVSLSCAVKGFYPSDIAVEWESN | |
| | | GQPENNYKTTPPVLDSDGSFFLVSKLTVDK | |
| | | SRWQQGNVFSCSVMHEALHNHYTQKSLSLS | |
| | | PGKGGSGAWSHPQFEK | |
| | L: | DIQMTQSPSSLSASVGDRVTITCSASQDIS | |
| | | NYLNWYQQKPGKAPKVLIYFTSSLHSGVPS | |
| | | RFSGSGSGTDFTLTISSLQPEDFATYYCQQ | |
| | | YSTVPWTFGQGTKVEIKRTVAAPSVFIFPP | |
| | | SDEQLKSGTASVVCLLNNFYPREAKVQWKV | |
| | | DNALQSGNSQESVTEQDSKDSTYSLSSTLT | |
| | | LSKADYEKHKVYACEVTHQGLSSPVTKSFN | |
| | | RGEC | |
| IL-10 | Knob: | SPGQGTQSENSCTHFPGNLPNMLRDLRDAF | |
| | | SRVKTFFQMKDQLDNLLLKESLLEDFKGYL | |
| | | GCQALSEMIQFYLEEVMPQAENQDPDIKAH | |
| | | VNSLGENLKTLRLRLRRCHRFLPCENKSKA | |
| | | VEQVKNAFNK | |
| | | LQEKGIYKAMSEFDIFINYIEAYMTMKIRN | |
| | | EPKSCDKTHTCPPCPAPELLGGPSVFLFPP | |
| | | KPKDTLMISRTPEVTCVVVDVSHEDPEVKF | |
| | | NWYVDGVEVHNAKTKPREEQYGSTYRVVSV | |
| | | LTVLHQDWLNGKEYKCKVSNKALPAPIEKT | |
| | | ISKAKGQPREPQVYTLPPSRDELTKNQVSL | |
| | | WCLVKGFYPSDIAVEWESNGQPENNYKTTP | |
| | | PVLDSDGSFFLYSKLTVDKSRWQQGNVFSC | |
| | | SVMHEALHNHYTQKSLSLSPGKGGSHHHHH | |
| | | H | |
| | Hole: | EVQLVESGGGLVQPGGSLRLSCAASGYTFT | |
| | | NYGMNWVRQAPGKGLEWVGWINTYTGEPTY | |
| | | AADFKRRFTFSLDTSKSTAYLQMNSLRAED | |
| | | TAVYYCAKYPHYYGSSHWYFDVWGQGTLVT | |
| | | VSSASTKGPSVFPLAPSSKSTSGGTAALGC | |
| | | LVKDYFPEPVTVSWNSGALTSGVHTFPAVL | |
| | | QSSGLYSLSSVVTVPSSSLGTQTYICNVNH | |
| | | KPSNTKVDKKVEPKSCDKTHTCPPCPAPEL | |
| | | LGGPSVFLFPPKPKDTLMISRTPEVTCVVV | |
| | | DVSHEDPEVKFNWYVDGVEVHNAKTKPREE | |
| | | QYGSTYRVVSVLTVLHQDWLNGKEYKCKVS | |
| | | NKALPAPIEKTISKAKGQPREPQVYTLPPS | |
| | | RDELTKNQVSLSCAVKGFYPSDIAVEWESN | |
| | | GQPENNYKTTPPVLDSDGSFFLVSKLTVDK | |
| | | SRWQQGNVFSCSVMHEALHNHYTQKSLSLS | |
| | | PGKGGSGAWSHPQFEK | |
| | L: | DIQMTQSPSSLSASVGDRVTITCSASQDIS | |
| | | NYLNWYQQKPGKAPKVLIYFTSSLHSGVPS | |
| | | RFSGSGSGTDFTLTISSLQPEDFATYYCQQ | |
| | | YSTVPWTFGQGTKVEIKRTVAAPSVFIFPP | |
| | | SDEQLKSGTASVVCLLNNFYPREAKVQWKV | |
| | | DNALQSGNSQESVTEQDSKDSTYSLSSTLT | |
| | | LSKADYEKHKVYACEVTHQGLSSPVTKSFN | |
| | | RGEC | |
| IL-11 | Knob: | PGPPPGPPRVSPDPRAELDSTVLLTRSLLA | |
| | | DTRQLAAQLRDKFPADGDHNLDSLPTLAMS | |
| | | AGALGALQLPGVLTRLRADLLSYLRHVQWL | |
| | | RRAGGSSLKTLEPELGTLQARLDRLLRRLQ | |
| | | LLMSRLALPQPPPDPPAPPLAPPSSAWGGI | |
| | | RAAHAILGGLHLTLDWAVRGLLLLKTRLEP | |
| | | KSCDKTHTCPPCPAPELLGGPSVFLFPPKP | |
| | | KDTLMISRTPEVTCVVVDVSHEDPEVKFNW | |
| | | YVDGVEVHNAKTKPREEQYGSTYRVVSVLT | |
| | | VLHQDWLNGKEYKCKVSNKALPAPIEKTIS | |
| | | KAKGQPREPQVYTLPPSRDELTKNQVSLWC | |
| | | LVKGFYPSDIAVEWESNGQPENNYKTTPPV | |
| | | LDSDGSFFLYSKLTVDKSRWQQGNVFSCSV | |
| | | MHEALHNHYTQKSLSLSPGKGGSHHHHHH | |
| | Hole: | EVQLVESGGGLVQPGGSLRLSCAASGYTFT | |
| | | NYGMNWVRQAPGKGLEWVGWINTYTGEPTY | |
| | | AADFKRRFTFSLDTSKSTAYLQMNSLRAED | |
| | | TAVYYCAKYPHYYGSSHWYFDVWGQGTLVT | |
| | | VSSASTKGPSVFPLAPSSKSTSGGTAALGC | |
| | | LVKDYFPEPVTVSWNSGALTSGVHTFPAVL | |
| | | QSSGLYSLSSVVTVPSSSLGTQTYICNVNH | |
| | | KPSNTKVDKKVEPKSCDKTHTCPPCPAPEL | |
| | | LGGPSVFLFPPKPKDTLMISRTPEVTCVVV | |
| | | DVSHEDPEVKFNWYVDGVEVHNAKTKPREE | |
| | | QYGSTYRVVSVLTVLHQDWLNGKEYKCKVS | |
| | | NKALPAPIEKTISKAKGQPREPQVYTLPPS | |
| | | RDELTKNQVSLSCAVKGFYPSDIAVEWESN | |
| | | GQPENNYKTTPPVLDSDGSFFLVSKLTVDK | |
| | | SRWQQGNVFSCSVMHEALHNHYTQKSLSLS | |
| | | PGKGGSGAWSHPQFEK | |
| | L: | DIQMTQSPSSLSASVGDRVTITCSASQDIS | |
| | | NYLNWYQQKPGKAPKVLIYFTSSLHSGVPS | |
| | | RFSGSGSGTDFTLTISSLQPEDFATYYCQQ | |
| | | YSTVPWTFGQGTKVEIKRTVAAPSVFIFPP | |
| | | SDEQLKSGTASVVCLLNNFYPREAKVQWKV | |
| | | DNALQSGNSQESVTEQDSKDSTYSLSSTLT | |
| | | LSKADYEKHKVYACEVTHQGLSSPVTKSFN | |
| | | RGEC | |
| IL-13 | Knob: | SPGPVPPSTALRELIEELVNITQNQKAPLC | |
| | | NGSMVWSINLTAGMYCAALESLINVSGCSA | |
| | | IEKTQRMLSGFCPHKVSAGQFSSLHVRDTK | |
| | | IEVAQFVKDLLLHLKKLFREGRFNEPKSCD | |
| | | KTHTCPPCPAPELLGGPSVFLFPPKPKDTL | |
| | | MISRTPEVTCVVVDVSHEDPEVKFNWYVDG | |
| | | VEVHNAKTKPREEQYGSTYRVVSVLTVLHQ | |
| | | DWLNGKEYKCKVSNKALPAPIEKTISKAKG | |
| | | QPREPQVYTLPPSRDELTKNQVSLWCLVKG | |
| | | FYPSDIAVEWESNGQPENNYKTTPPVLDSD | |
| | | GSFFLYSKLTVDKSRWQQGNVFSCSVMHEA | |
| | | LHNHYTQKSLSLSPGKGGSHHHHHH | |
| | Hole: | EVQLVESGGGLVQPGGSLRLSCAASGYTFT | |
| | | NYGMNWVRQAPGKGLEWVGWINTYTGEPTY | |
| | | AADFKRRFTFSLDTSKSTAYLQMNSLRAED | |
| | | TAVYYCAKYPHYYGSSHWYFDVWGQGTLVT | |
| | | VSSASTKGPSVFPLAPSSKSTSGGTAALGC | |
| | | LVKDYFPEPVTVSWNSGALTSGVHTFPAVL | |
| | | QSSGLYSLSSVVTVPSSSLGTQTYICNVNH | |
| | | KPSNTKVDKKVEPKSCDKTHTCPPCPAPEL | |
| | | LGGPSVFLFPPKPKDTLMISRTPEVTCVVV | |
| | | DVSHEDPEVKFNWYVDGVEVHNAKTKPREE | |
| | | QYGSTYRVVSVLTVLHQDWLNGKEYKCKVS | |
| | | NKALPAPIEKTISKAKGQPREPQVYTLPPS | |
| | | RDELTKNQVSLSCAVKGFYPSDIAVEWESN | |
| | | GQPENNYKTTPPVLDSDGSFFLVSKLTVDK | |
| | | SRWQQGNVFSCSVMHEALHNHYTQKSLSLS | |
| | | PGKGGSGAWSHPQFEK | |
| | L: | DIQMTQSPSSLSASVGDRVTITCSASQDIS | |
| | | NYLNWYQQKPGKAPKVLIYFTSSLHSGVPS | |
| | | RFSGSGSGTDFTLTISSLQPEDFATYYCQQ | |
| | | YSTVPWTFGQGTKVEIKRTVAAPSVFIFPP | |
| | | SDEQLKSGTASVVCLLNNFYPREAKVQWKV | |
| | | DNALQSGNSQESVTEQDSKDSTYSLSSTLT | |
| | | LSKADYEKHKVYACEVTHQGLSSPVTKSFN | |
| | | RGEC | |
| IL-15 | Knob: | NWVNVISDLKKIEDLIQSMHIDATLYTESD | |
| | | VHPSCKVTAMKCFLLELQVISLESGDASIH | |
| | | DTVENLIILANNSLSSNGNVTESGCKECEE | |
| | | LEEKNIKEFLQSFVHIVQMFINTSEPKSCD | |
| | | KTHTCPPCPAPELLGGPSVFLFPPKPKDTL | |
| | | MISRTPEVTCVVVDVSHEDPEVKFNWYVDG | |
| | | VEVHNAKTKPREEQYGSTYRVVSVLTVLHQ | |
| | | DWLNGKEYKCKVSNKALPAPIEKTISKAKG | |
| | | QPREPQVYTLPPSRDELTKNQVSLWCLVKG | |
| | | FYPSDIAVEWESNGQPENNYKTTPPVLDSD | |
| | | GSFFLYSKLTVDKSRWQQGNVFSCSVMHEA | |
| | | LHNHYTQKSLSLSPGKGGSHHHHHH | |
| | Hole: | EVQLVESGGGLVQPGGSLRLSCAASGYTFT | |
| | | NYGMNWVRQAPGKGLEWVGWINTYTGEPTY | |
| | | AADFKRRFTFSLDTSKSTAYLQMNSLRAED | |
| | | TAVYYCAKYPHYYGSSHWYFDVWGQGTLVT | |
| | | VSSASTKGPSVFPLAPSSKSTSGGTAALGC | |
| | | LVKDYFPEPVTVSWNSGALTSGVHTFPAVL | |
| | | QSSGLYSLSSVVTVPSSSLGTQTYICNVNH | |
| | | KPSNTKVDKKVEPKSCDKTHTCPPCPAPEL | |
| | | LGGPSVFLFPPKPKDTLMISRTPEVTCVVV | |
| | | DVSHEDPEVKFNWYVDGVEVHNAKTKPREE | |
| | | QYGSTYRVVSVLTVLHQDWLNGKEYKCKVS | |
| | | NKALPAPIEKTISKAKGQPREPQVYTLPPS | |
| | | RDELTKNQVSLSCAVKGFYPSDIAVEW | |
| | | ESNGQPENNYKTTPPVLDSDGSFFLVSKLT | |
| | | VDKSRWQQGNVFSCSVMHEALHNHYTQKSL | |
| | | SLSPGKGGSGAWSHPQFEK | |
| | L: | DIQMTQSPSSLSASVGDRVTITCSASQDIS | |
| | | NYLNWYQQKPGKAPKVLIYFTSSLHSGVPS | |
| | | RFSGSGSGTDFTLTISSLQPEDFATYYCQQ | |
| | | YSTVPWTFGQGTKVEIKRTVAAPSVFIFPP | |
| | | SDEQLKSGTASVVCLLNNFYPREAKVQWKV | |
| | | DNALQSGNSQESVTEQDSKDSTYSLSSTLT | |
| | | LSKADYEKHKVYACEVTHQGLSSPVTKSFN | |
| | | RGEC | |
| IL-17A | Knob: | IVKAGITIPRNPGCPNSEDKNFPRTVMVNL | |
| | | NIHNRNTNTNPKRSSDYYNRSTSPWNLHRN | |
| | | EDPERYPSVIWEAKCRHLGCINADGNVDYH | |
| | | MNSVPIQQEILVLRREPPHCPNSFRLEKIL | |
| | | VSVGCTCVTPIVHHVAdEPKSCDKTHTCPP | |
| | | CPAPELLGGPSVFLFPPKPKDTLMISRTPE | |
| | | VTCVVVDVSHEDPEVKFNWYVDGVEVHNAK | |
| | | TKPREEQYGSTYRVVSVLTVLHQDWLNGKE | |
| | | YKCKVSNKALPAPIEKTISKAKGQPREPQV | |
| | | YTLPPSRDELTKNQVSLWCLVKGFYPSDIA | |
| | | VEWESNGQPENNYKTTPPVLDSDGSFFLYS | |
| | | KLTVDKSRWQQGNVFSCSVMHEALHNHYTQ | |
| | | KSLSLSPGKGGSHHHHHH | |
| | Hole: | EVQLVESGGGLVQPGGSLRLSCAASGYTFT | |
| | | NYGMNWVRQAPGKGLEWVGWINTYTGEPTY | |
| | | AADFKRRFTFSLDTSKSTAYLQMNSLRAED | |
| | | TAVYYCAKYPHYYGSSHWYFDVWGQGTLVT | |
| | | VSSASTKGPSVFPLAPSSKSTSGGTAALGC | |
| | | LVKDYFPEPVTVSWNSGALTSGVHTFPAVL | |
| | | QSSGLYSLSSVVTVPSSSLGTQTYICNVNH | |
| | | KPSNTKVDKKVEPKSCDKTHTCPPCPAPEL | |
| | | LGGPSVFLFPPKPKDTLMISRTPEVTCVVV | |
| | | DVSHEDPEVKFNWYVDGVEVHNAKTKPREE | |
| | | QYGSTYRVVSVLTVLHQDWLNGKEYKCKVS | |
| | | NKALPAPIEKTISKAKGQPREPQVYTLPPS | |
| | | RDELTKNQVSLSCAVKGFYPSDIAVEWESN | |
| | | GQPENNYKTTPPVLDSDGSFFLVSKLTVDK | |
| | | SRWQQGNVFSCSVMHEALHNHYTQKSLSLS | |
| | | PGKGGSGAWSHPQFEK | |
| | L: | DIQMTQSPSSLSASVGDRVTITCSASQDIS | |
| | | NYLNWYQQKPGKAPKVLIYFTSSLHSGVPS | |
| | | RFSGSGSGTDFTLTISSLQPEDFATYYCQQ | |
| | | YSTVPWTFGQGTKVEIKRTVAAPSVFIFPP | |
| | | SDEQLKSGTASVVCLLNNFYPREAKVQWKV | |
| | | DNALQSGNSQESVTEQDSKDSTYSLSSTLT | |
| | | LSKADYEKHKVYACEVTHQGLSSPVTKSFN | |
| | | RGEC | |
| IL-17B | Knob: | QPRSPKSKRKGQGRPGPLAPGPHQVPLDLV | |
| | | SRMKPYARMEEYERNIEEMVAQLRNSSELA | |
| | | QRKCEVNLQLWMSNKRSLSPWGYSINHDPS | |
| | | RIPVDLPEARCLCLGCVNPFTMQEDRSMVS | |
| | | VPVFSQVPVRRRLCPPPPRTGPCRQRAVME | |
| | | TIAVGCTCIFEPKSCDKTHTCPPCPAPELL | |
| | | GGPSVFLFPPKPKDTLMISRTPEVTCVVVD | |
| | | VSHEDPEVKFNWYVDGVEVHNAKTKPREEQ | |
| | | YGSTYRVVSVLTVLHQDWLNGKEYKCKVSN | |
| | | KALPAPIEKTISKAKGQPREPQVYTLPPSR | |
| | | DELTKNQVSLWCLVKGFYPSDIAVEWESNG | |
| | | QPENNYKTTPPVLDSDGSFFLYSKLTVDKS | |
| | | RWQQGNVFSCSVMHEALHNHYTQKSLSLSP | |
| | | GKGGSHHHHHH | |
| | Hole: | EVQLVESGGGLVQPGGSLRLSCAASGYTFT | |
| | | NYGMNWVRQAPGKGLEWVGWINTYTGEPTY | |
| | | AADFKRRFTFSLDTSKSTAYLQMNSLRAED | |
| | | TAVYYCAKYPHYYGSSHWYFDVWGQGTLVT | |
| | | VSSASTKGPSVFPLAPSSKSTSGGTAALGC | |
| | | LVKDYFPEPVTVSWNSGALTS | |
| | | GVHTFPAVLQSSGLYSLSSVVTVPSSSLGT | |
| | | QTYICNVNHKPSNTKVDKKVEPKSCDKTHT | |
| | | CPPCPAPELLGGPSVFLFPPKPKDTLMISR | |
| | | TPEVTCVVVDVSHEDPEVKFNWYVDGVEVH | |
| | | NAKTKPREEQYGSTYRVVSVLTVLHQDWLN | |
| | | GKEYKCKVSNKALPAPIEKTISKAKGQPRE | |
| | | PQVYTLPPSRDELTKNQVSLSCAVKGFYPS | |
| | | DIAVEWESNGQPENNYKTTPPVLDSDGSFF | |
| | | LVSKLTVDKSRWQQGNVFSCSVMHEALHNH | |
| | | YTQKSLSLSPGKGGSGAWSHPQFEK | |
| | L: | DIQMTQSPSSLSASVGDRVTITCSASQDIS | |
| | | NYLNWYQQKPGKAPKVLIYFTSSLHSGVPS | |
| | | RFSGSGSGTDFTLTISSLQPEDFATYYCQQ | |
| | | YSTVPWTFGQGTKVEIKRTVAAPSVFIFPP | |
| | | SDEQLKSGTASVVCLLNNFYPREAKVQWKV | |
| | | DNALQSGNSQESVTEQDSKDSTYSLSSTLT | |
| | | LSKADYEKHKVYACEVTHQGLSSPVTKSFN | |
| | | RGEC | |
| IL-17C | Knob: | HHDPSLRGHPHSHGTPHCYSAEELPLGQAP | |
| | | PHLLARGAKWGQALPVALVSSLEAASHRGR | |
| | | HERPSATTQCPVLRPEEVLEADTHQRSISP | |
| | | WRYRVDTDEDRYPQKLAFAECLCRGCIDAR | |
| | | TGRETAALNSVRLLQSLLVLRRRPCSRDGS | |
| | | GLPTPGAFAFHTEFIHVPVGCTCVLPRSVE | |
| | | PKSCDKTHTCPPCPAPELLGGPSVFLFPPK | |
| | | PKDTLMISRTPEVTCVVVDVSHEDPEVKFN | |
| | | WYVDGVEVHNAKTKPREEQYGSTYRVVSVL | |
| | | TVLHQDWLNGKEYKCKVSNKALPAPIEKTI | |
| | | SKAKGQPREPQVYTLPPSRDELTKNQVSLW | |
| | | CLVKGFYPSDIAVEWESNGQPENNYKTTPP | |
| | | VLDSDGSFFLYSKLTVDKSRWQQGNVFSCS | |
| | | VMHEALHNHYTQKSLSLSPGKGGSHHHHHH | |
| | Hole: | EVQLVESGGGLVQPGGSLRLSCAASGYTFT | |
| | | NYGMNWVRQAPGKGLEWVGWINTYTGEPTY | |
| | | AADFKRRFTFSLDTSKSTAYLQMNSLRAED | |
| | | TAVYYCAKYPHYYGSSHWYFDVWGQGTLVT | |
| | | VSSASTKGPSVFPLAPSSKSTSGGTAALGC | |
| | | LVKDYFPEPVTVSWNSGALTSGVHTFPAVL | |
| | | QSSGLYSLSSVVTVPSSSLGTQTYICNVNH | |
| | | KPSNTKVDKKVEPKSCDKTHTCPPCPAPEL | |
| | | LGGPSVFLFPPKPKDTLMISRTPEVTCVVV | |
| | | DVSHEDPEVKFNWYVDGVEVHNAKTKPREE | |
| | | QYGSTYRVVSVLTVLHQDWLNGKEYKCKVS | |
| | | NKALPAPIEKTISKAKGQPREPQVYTLPPS | |
| | | RDELTKNQVSLSCAVKGFYPSDIAVEWESN | |
| | | GQPENNYKTTPPVLDSDGSFFLVSKLTVDK | |
| | | SRWQQGNVFSCSVMHEALHNHYTQKSLSLS | |
| | | PGKGGSGAWSHPQFEK | |
| | L: | DIQMTQSPSSLSASVGDRVTITCSASQDIS | |
| | | NYLNWYQQKPGKAPKVLIYFTSSLHSGVPS | |
| | | RFSGSGSGTDFTLTISSLQPEDFATYYCQQ | |
| | | YSTVPWTFGQGTKVEIKRTVAAPSVFIFPP | |
| | | SDEQLKSGTASVVCLLNNFYPREAKVQWKV | |
| | | DNALQSGNSQESVTEQDSKDSTYSLSSTLT | |
| | | LSKADYEKHKVYACEVTHQGLSSPVTKSFN | |
| | | RGEC | |
| IL-17D | Knob: | AGAPRAGRRPARPRGCADRPEELLEQLYGR | |
| | | LAAGVLSAFHHTLQLGPREQARNASCPAGG | |
| | | RPADRRFRPPTNLRSVSPWAYRISYDPARY | |
| | | PRYLPEAYCLCRGCLTGLFGEEDVRFRSAP | |
| | | VYMPTVVLRRTPACAGGRSVYTEAYVTIPV | |
| | | GCTCVPEPEKDADSINSSIDKQGAKLLLGP | |
| | | NDAPAGPEPKSCDKTHTCPPCPAPELLGGP | |
| | | SVFLFPPKPKDTLMISRTPEVTCVVVDVSH | |
| | | EDPEVKFNWYVDGVEVHNAKTKPREEQYGS | |
| | | TYRVVSVLTVLHQDWLNGKEYKCKVSNKAL | |
| | | PAPIEKTISKAKGQPREPQVYTLPPSRDEL | |
| | | TKNQVSLWCLVKGFYPSD | |
| | | IAVEWESNGQPENNYKTTPPVLDSDGSFFL | |
| | | YSKLTVDKSRWQQGNVFSCSVMHEALHNHY | |
| | | TQKSLSLSPGKGGSHHHHHH | |
| | Hole: | EVQLVESGGGLVQPGGSLRLSCAASGYTFT | |
| | | NYGMNWVRQAPGKGLEWVGWINTYTGEPTY | |
| | | AADFKRRFTFSLDTSKSTAYLQMNSLRAED | |
| | | TAVYYCAKYPHYYGSSHWYFDVWGQGTLVT | |
| | | VSSASTKGPSVFPLAPSSKSTSGGTAALGC | |
| | | LVKDYFPEPVTVSWNSGALTSGVHTFPAVL | |
| | | QSSGLYSLSSVVTVPSSSLGTQTYICNVNH | |
| | | KPSNTKVDKKVEPKSCDKTHTCPPCPAPEL | |
| | | LGGPSVFLFPPKPKDTLMISRTPEVTCVVV | |
| | | DVSHEDPEVKFNWYVDGVEVHNAKTKPREE | |
| | | QYGSTYRVVSVLTVLHQDWLNGKEYKCKVS | |
| | | NKALPAPIEKTISKAKGQPREPQVYTLPPS | |
| | | RDELTKNQVSLSCAVKGFYPSDIAVEWESN | |
| | | GQPENNYKTTPPVLDSDGSFFLVSKLTVDK | |
| | | SRWQQGNVFSCSVMHEALHNHYTQKSLSLS | |
| | | PGKGGSGAWSHPQFEK | |
| | L: | DIQMTQSPSSLSASVGDRVTITCSASQDIS | |
| | | NYLNWYQQKPGKAPKVLIYFTSSLHSGVPS | |
| | | RFSGSGSGTDFTLTISSLQPEDFATYYCQQ | |
| | | YSTVPWTFGQGTKVEIKRTVAAPSVFIFPP | |
| | | SDEQLKSGTASVVCLLNNFYPREAKVQWKV | |
| | | DNALQSGNSQESVTEQDSKDSTYSLSSTLT | |
| | | LSKADYEKHKVYACEVTHQGLSSPVTKSFN | |
| | | RGEC | |
| IL-17F | Knob: | RKIPKVGHTFFQKPESCPPVPGGSMKLDIG | |
| | | IINENQRVSMSRNIESRSTSPWNYTVTWDP | |
| | | NRYPSEVVQAQCRNLGCINAQGKEDISMNS | |
| | | VPIQQETLVVRRKHQGCSVSFQLEKVLVTV | |
| | | GCTCVTPVIHHVQEPKSCDKTHTCPPCPAP | |
| | | ELLGGPSVFLFPPKPKDTLMISRTPEVTCV | |
| | | VVDVSHEDPEVKFNWYVDGVEVHNAKTKPR | |
| | | EEQYGSTYRVVSVLTVLHQDWLNGKEYKCK | |
| | | VSNKALPAPIEKTISKAKGQPREPQVYTLP | |
| | | PSRDELTKNQVSLWCLVKGFYPSDIAVEWE | |
| | | SNGQPENNYKTTPPVLDSDGSFFLYSKLTV | |
| | | DKSRWQQGNVFSCSVMHEALHNHYTQKSLS | |
| | | LSPGKGGSHHHHHH | |
| | Hole: | EVQLVESGGGLVQPGGSLRLSCAASGYTFT | |
| | | NYGMNWVRQAPGKGLEWVGWINTYTGEPTY | |
| | | AADFKRRFTFSLDTSKSTAYLQMNSLRAED | |
| | | TAVYYCAKYPHYYGSSHWYFDVWGQGTLVT | |
| | | VSSASTKGPSVFPLAPSSKSTSGGTAALGC | |
| | | LVKDYFPEPVTVSWNSGALTSGVHTFPAVL | |
| | | QSSGLYSLSSVVTVPSSSLGTQTYICNVNH | |
| | | KPSNTKVDKKVEPKSCDKTHTCPPCPAPEL | |
| | | LGGPSVFLFPPKPKDTLMISRTPEVTCVVV | |
| | | DVSHEDPEVKFNWYVDGVEVHNAKTKPREE | |
| | | QYGSTYRVVSVLTVLHQDWLNGKEYKCKVS | |
| | | NKALPAPIEKTISKAKGQPREPQVYTLPPS | |
| | | RDELTKNQVSLSCAVKGFYPSDIAVEWESN | |
| | | GQPENNYKTTPPVLDSDGSFFLVSKLTVDK | |
| | | SRWQQGNVFSCSVMHEALHNHYTQKSLSLS | |
| | | PGKGGSGAWSHPQFEK | |
| | L: | DIQMTQSPSSLSASVGDRVTITCSASQDIS | |
| | | NYLNWYQQKPGKAPKVLIYFTSSLHSGVPS | |
| | | RFSGSGSGTDFTLTISSLQPEDFATYYCQQ | |
| | | YSTVPWTFGQGTKVEIKRTVAAPSVFIFPP | |
| | | SDEQLKSGTASVVCLLNNFYPREAKVQWKV | |
| | | DNALQSGNSQESVTEQDSKDSTYSLSSTLT | |
| | | LSKADYEKHKVYACEVTHQGLSSPVTKSFN | |
| | | RGEC | |
| IL-18 | Knob: | YFGKLESKLSVIRNLNDQVLFIDQGNRPLF | |
| | | EDMTDSDCRDNAPRTIFIISMYKDSQPRGM | |
| | | AVTISVKCEKISTLSCENKIISFKEMNPPD | |
| | | NIKDTKSDIIFFQRSVPGHDNKMQFESSSY | |
| | | EGYFLACEKERDLFK | |
| | | LILKKEDELGDRSIMFTVQNEDEPKSCDKT | |
| | | HTCPPCPAPELLGGPSVFLFPPKPKDTLMI | |
| | | SRTPEVTCVVVDVSHEDPEVKFNWYVDGVE | |
| | | VHNAKTKPREEQYGSTYRVVSVLTVLHQDW | |
| | | LNGKEYKCKVSNKALPAPIEKTISKAKGQP | |
| | | REPQVYTLPPSRDELTKNQVSLWCLVKGFY | |
| | | PSDIAVEWESNGQPENNYKTTPPVLDSDGS | |
| | | FFLYSKLTVDKSRWQQGNVFSCSVMHEALH | |
| | | NHYTQKSLSLSPGKGGSHHHHHH | |
| | Hole: | EVQLVESGGGLVQPGGSLRLSCAASGYTFT | |
| | | NYGMNWVRQAPGKGLEWVGWINTYTGEPTY | |
| | | AADFKRRFTFSLDTSKSTAYLQMNSLRAED | |
| | | TAVYYCAKYPHYYGSSHWYFDVWGQGTLVT | |
| | | VSSASTKGPSVFPLAPSSKSTSGGTAALGC | |
| | | LVKDYFPEPVTVSWNSGALTSGVHTFPAVL | |
| | | QSSGLYSLSSVVTVPSSSLGTQTYICNVNH | |
| | | KPSNTKVDKKVEPKSCDKTHTCPPCPAPEL | |
| | | LGGPSVFLFPPKPKDTLMISRTPEVTCVVV | |
| | | DVSHEDPEVKFNWYVDGVEVHNAKTKPREE | |
| | | QYGSTYRVVSVLTVLHQDWLNGKEYKCKVS | |
| | | NKALPAPIEKTISKAKGQPREPQVYTLPPS | |
| | | RDELTKNQVSLSCAVKGFYPSDIAVEWESN | |
| | | GQPENNYKTTPPVLDSDGSFFLVSKLTVDK | |
| | | SRWQQGNVFSCSVMHEALHNHYTQKSLSLS | |
| | | PGKGGSGAWSHPQFEK | |
| | L: | DIQMTQSPSSLSASVGDRVTITCSASQDIS | |
| | | NYLNWYQQKPGKAPKVLIYFTSSLHSGVPS | |
| | | RFSGSGSGTDFTLTISSLQPEDFATYYCQQ | |
| | | YSTVPWTFGQGTKVEIKRTVAAPSVFIFPP | |
| | | SDEQLKSGTASVVCLLNNFYPREAKVQWKV | |
| | | DNALQSGNSQESVTEQDSKDSTYSLSSTLT | |
| | | LSKADYEKHKVYACEVTHQGLSSPVTKSFN | |
| | | RGEC | |
| IL-19 | Knob: | LRRCLISTDMHHIEESFQEIKRAIQAKDTF | |
| | | PNVTILSTLETLQIIKPLDVCCVTKNLLAF | |
| | | YVDRVFKDHQEPNPKILRKISSIANSFLYM | |
| | | QKTLRQCQEQRQCHCRQEATNATRVIHDNY | |
| | | DQLEVHAAAIKSLGELDVFLAWINKNHEVM | |
| | | FSAEPKSCDKTHTCPPCPAPELLGGPSVFL | |
| | | FPPKPKDTLMISRTPEVTCVVVDVSHEDPE | |
| | | VKFNWYVDGVEVHNAKTKPREEQYGSTYRV | |
| | | VSVLTVLHQDWLNGKEYKCKVSNKALPAPI | |
| | | EKTISKAKGQPREPQVYTLPPSRDELTKNQ | |
| | | VSLWCLVKGFYPSDIAVEWESNGQPENNYK | |
| | | TTPPVLDSDGSFFLYSKLTVDKSRWQQGNV | |
| | | FSCSVMHEALHNHYTQKSLSLSPGKGGSHH | |
| | | HHHH | |
| | Hole: | EVQLVESGGGLVQPGGSLRLSCAASGYTFT | |
| | | NYGMNWVRQAPGKGLEWVGWINTYTGEPTY | |
| | | AADFKRRFTFSLDTSKSTAYLQMNSLRAED | |
| | | TAVYYCAKYPHYYGSSHWYFDVWGQGTLVT | |
| | | VSSASTKGPSVFPLAPSSKSTSGGTAALGC | |
| | | LVKDYFPEPVTVSWNSGALTSGVHTFPAVL | |
| | | QSSGLYSLSSVVTVPSSSLGTQTYICNVNH | |
| | | KPSNTKVDKKVEPKSCDKTHTCPPCPAPEL | |
| | | LGGPSVFLFPPKPKDTLMISRTPEVTCVVV | |
| | | DVSHEDPEVKFNWYVDGVEVHNAKTKPREE | |
| | | QYGSTYRVVSVLTVLHQDWLNGKEYKCKVS | |
| | | NKALPAPIEKTISKAKGQPREPQVYTLPPS | |
| | | RDELTKNQVSLSCAVKGFYPSDIAVEWESN | |
| | | GQPENNYKTTPPVLDSDGSFFLVSKLTVDK | |
| | | SRWQQGNVFSCSVMHEALHNHYTQKSLSLS | |
| | | PGKGGSGAWSHPQFEK | |
| | L: | DIQMTQSPSSLSASVGDRVTITCSASQDIS | |
| | | NYLNWYQQKPGKAPKVLIYFTSSLHSGVPS | |
| | | RFSGSGSGTDFTLTISSLQPEDFATYYCQQ | |
| | | YSTVPWTFGQGTKVEIKRTVAAPSVFIFPP | |
| | | SDEQLKSGTASVVCLLNNFYPREAKVQWKV | |
| | | DNALQSGNSQESVTEQDSKDSTYSLSSTLT | |
| | | LSKADYEKHKVYACEVTHQGLSSPVTKSFN | |
| | | RGEC | |
| IL-20 | Knob: | LKTLNLGSCVIATNLQEIRNGFSEIRGSVQ | |
| | | AKDGNIDIRILRRTESLQDTKPANRCCLLR | |
| | | HLLRLYLDRVFKNYQTPDHYTLRKISSLAN | |
| | | SFLTIKKDLRLCHAHMTCHCGEEAMKKYSQ | |
| | | ILSHFEKLEPQAAVVKALGELDILLQWMEE | |
| | | TEEPKSCDKTHTCPPCPAPELLGGPSVFLF | |
| | | PPKPKDTLMISRTPEVTCVVVDVSHEDPEV | |
| | | KFNWYVDGVEVHNAKTKPREEQYGSTYRVV | |
| | | SVLTVLHQDWLNGKEYKCKVSNKALPAPIE | |
| | | KTISKAKGQPREPQVYTLPPSRDELTKNQV | |
| | | SLWCLVKGFYPSDIAVEWESNGQPENNYKT | |
| | | TPPVLDSDGSFFLYSKLTVDKSRWQQGNVF | |
| | | SCSVMHEALHNHYTQKSLSLSPGKGGSHHH | |
| | | HHH | |
| | Hole: | EVQLVESGGGLVQPGGSLRLSCAASGYTFT | |
| | | NYGMNWVRQAPGKGLEWVGWINTYTGEPTY | |
| | | AADFKRRFTFSLDTSKSTAYLQMNSLRAED | |
| | | TAVYYCAKYPHYYGSSHWYFDVWGQGTLVT | |
| | | VSSASTKGPSVFPLAPSSKSTSGGTAALGC | |
| | | LVKDYFPEPVTVSWNSGALTSGVHTFPAVL | |
| | | QSSGLYSLSSVVTVPSSSLGTQTYICNVNH | |
| | | KPSNTKVDKKVEPKSCDKTHTCPPCPAPEL | |
| | | LGGPSVFLFPPKPKDTLMISRTPEVTCVVV | |
| | | DVSHEDPEVKFNWYVDGVEVHNAKTKPREE | |
| | | QYGSTYRVVSVLTVLHQDWLNGKEYKCKVS | |
| | | NKALPAPIEKTISKAKGQPREPQVYTLPPS | |
| | | RDELTKNQVSLSCAVKGFYPSDIAVEWESN | |
| | | GQPENNYKTTPPVLDSDGSFFLVSKLTVDK | |
| | | SRWQQGNVFSCSVMHEALHNHYTQKSLSLS | |
| | | PGKGGSGAWSHPQFEK | |
| | L: | DIQMTQSPSSLSASVGDRVTITCSASQDIS | |
| | | NYLNWYQQKPGKAPKVLIYFTSSLHSGVPS | |
| | | RFSGSGSGTDFTLTISSLQPEDFATYYCQQ | |
| | | YSTVPWTFGQGTKVEIKRTVAAPSVFIFPP | |
| | | SDEQLKSGTASVVCLLNNFYPREAKVQWKV | |
| | | DNALQSGNSQESVTEQDSKDSTYSLSSTLT | |
| | | LSKADYEKHKVYACEVTHQGLSSPVTKSFN | |
| | | RGEC | |
| IL-21 | Knob: | QDRHMIRMRQLIDIVDQLKNYVNDLVPEFL | |
| | | PAPEDVETNCEWSAFSCFQKAQLKSANTGN | |
| | | NERIINVSIKKLKRKPPSTNAGRRQKHRLT | |
| | | CPSCDSYEKKPPKEFLERFKSLLQKMIHQH | |
| | | LSSRTHGSEDSEPKSCDKTHTCPPCPAPEL | |
| | | LGGPSVFLFPPKPKDTLMISRTPEVTCVVV | |
| | | DVSHEDPEVKFNWYVDGVEVHNAKTKPREE | |
| | | QYGSTYRVVSVLTVLHQDWLNGKEYKCKVS | |
| | | NKALPAPIEKTISKAKGQPREPQVYTLPPS | |
| | | RDELTKNQVSLWCLVKGFYPSDIAVEWESN | |
| | | GQPENNYKTTPPVLDSDGSFFLYSKLTVDK | |
| | | SRWQQGNVFSCSVMHEALHNHYTQKSLSLS | |
| | | PGKGGSHHHHHH | |
| | Hole: | EVQLVESGGGLVQPGGSLRLSCAASGYTFT | |
| | | NYGMNWVRQAPGKGLEWVGWINTYTGEPTY | |
| | | AADFKRRFTFSLDTSKSTAYLQMNSLRAED | |
| | | TAVYYCAKYPHYYGSSHWYFDVWGQGTLVT | |
| | | VSSASTKGPSVFPLAPSSKSTSGGTAALGC | |
| | | LVKDYFPEPVTVSWNSGALTSGVHTFPAVL | |
| | | QSSGLYSLSSVVTVPSSSLGTQTYICNVNH | |
| | | KPSNTKVDKKVEPKSCDKTHTCPPCPAPEL | |
| | | LGGPSVFLFPPKPKDTLMISRTPEVTCVVV | |
| | | DVSHEDPEVKFNWYVDGVEVHNAKTKPREE | |
| | | QYGSTYRVVSVLTVLHQDWLNGKEYKCKVS | |
| | | NKALPAPIEKTISK | |
| | | AKGQPREPQVYTLPPSRDELTKNQVSLSCA | |
| | | VKGFYPSDIAVEWESNGQPENNYKTTPPVL | |
| | | DSDGSFFLVSKLTVDKSRWQQGNVFSCSVM | |
| | | HEALHNHYTQKSLSLSPGKGGSGAWSHPQF | |
| | | EK | |
| | L: | DIQMTQSPSSLSASVGDRVTITCSASQDIS | |
| | | NYLNWYQQKPGKAPKVLIYFTSSLHSGVPS | |
| | | RFSGSGSGTDFTLTISSLQPEDFATYYCQQ | |
| | | YSTVPWTFGQGTKVEIKRTVAAPSVFIFPP | |
| | | SDEQLKSGTASVVCLLNNFYPREAKVQWKV | |
| | | DNALQSGNSQESVTEQDSKDSTYSLSSTLT | |
| | | LSKADYEKHKVYACEVTHQGLSSPVTKSFN | |
| | | RGEC | |
| IL-22 | Knob: | APISSHCRLDKSNFQQPYITNRTFMLAKEA | |
| | | SLADNNTDVRLIGEKLFHGVSMSERCYLMK | |
| | | QVLNFTLEEVLFPQSDRFQPYMQEVVPFLA | |
| | | RLSNRLSTCHIEGDDLHIQRNVQKLKDTVK | |
| | | KLGESGEIKAIGELDLLFMSLRNACIEPKS | |
| | | CDKTHTCPPCPAPELLGGPSVFLFPPKPKD | |
| | | TLMISRTPEVTCVVVDVSHEDPEVKFNWYV | |
| | | DGVEVHNAKTKPREEQYGSTYRVVSVLTVL | |
| | | HQDWLNGKEYKCKVSNKALPAPIEKTISKA | |
| | | KGQPREPQVYTLPPSRDELTKNQVSLWCLV | |
| | | KGFYPSDIAVEWESNGQPENNYKTTPPVLD | |
| | | SDGSFFLYSKLTVDKSRWQQGNVFSCSVMH | |
| | | EALHNHYTQKSLSLSPGKGGSHHHHHH | |
| | Hole: | EVQLVESGGGLVQPGGSLRLSCAASGYTFT | |
| | | NYGMNWVRQAPGKGLEWVGWINTYTGEPTY | |
| | | AADFKRRFTFSLDTSKSTAYLQMNSLRAED | |
| | | TAVYYCAKYPHYYGSSHWYFDVWGQGTLVT | |
| | | VSSASTKGPSVFPLAPSSKSTSGGTAALGC | |
| | | LVKDYFPEPVTVSWNSGALTSGVHTFPAVL | |
| | | QSSGLYSLSSVVTVPSSSLGTQTYICNVNH | |
| | | KPSNTKVDKKVEPKSCDKTHTCPPCPAPEL | |
| | | LGGPSVFLFPPKPKDTLMISRTPEVTCVVV | |
| | | DVSHEDPEVKFNWYVDGVEVHNAKTKPREE | |
| | | QYGSTYRVVSVLTVLHQDWLNGKEYKCKVS | |
| | | NKALPAPIEKTISKAKGQPREPQVYTLPPS | |
| | | RDELTKNQVSLSCAVKGFYPSDIAVEWESN | |
| | | GQPENNYKTTPPVLDSDGSFFLVSKLTVDK | |
| | | SRWQQGNVFSCSVMHEALHNHYTQKSLSLS | |
| | | PGKGGSGAWSHPQFEK | |
| | L: | DIQMTQSPSSLSASVGDRVTITCSASQDIS | |
| | | NYLNWYQQKPGKAPKVLIYFTSSLHSGVPS | |
| | | RFSGSGSGTDFTLTISSLQPEDFATYYCQQ | |
| | | YSTVPWTFGQGTKVEIKRTVAAPSVFIFPP | |
| | | SDEQLKSGTASVVCLLNNFYPREAKVQWKV | |
| | | DNALQSGNSQESVTEQDSKDSTYSLSSTLT | |
| | | LSKADYEKHKVYACEVTHQGLSSPVTKSFN | |
| | | RGEC | |
| IL-24 | Knob: | QEFHFGPCQVKGVVPQKLWEAFWAVKDTMQ | |
| | | AQDNITSARLLQQEVLQNVSDAESCYLVHT | |
| | | LLEFYLKTVFKNYHNRTVEVRTLKSFSTLA | |
| | | NNFVLIVSQLQPSQENEMFSIRDSAHRRFL | |
| | | LFRRAFKQLDVEAALTKALGEVDILLTWMQ | |
| | | KFYKLEPKSCDKTHTCPPCPAPELLGGPSV | |
| | | FLFPPKPKDTLMISRTPEVTCVVVDVSHED | |
| | | PEVKFNWYVDGVEVHNAKTKPREEQYGSTY | |
| | | RVVSVLTVLHQDWLNGKEYKCKVSNKALPA | |
| | | PIEKTISKAKGQPREPQVYTLPPSRDELTK | |
| | | NQVSLWCLVKGFYPSDIAVEWESNGQPENN | |
| | | YKTTPPVLDSDGSFFLYSKLTVDKSRWQQG | |
| | | NVFSCSVMHEALHNHYTQKSLSLSPGKGGS | |
| | | HHHHHH | |
| | Hole: | EVQLVESGGGLVQPGGSLRLSCAASGYTFT | |
| | | NYGMNWVRQAPGKGLEWVGWINTYTGEPTY | |
| | | AADFKRRFTFSLDTSKSTAYLQMNSLRAED | |
| | | TAVYYCAKYPHYYGSSHWYFDVWGQGTLVT | |
| | | VSSASTK | |
| | | GPSVFPLAPSSKSTSGGTAALGCLVKDYFP | |
| | | EPVTVSWNSGALTSGVHTFPAVLQSSGLYS | |
| | | LSSVVTVPSSSLGTQTYICNVNHKPSNTKV | |
| | | DKKVEPKSCDKTHTCPPCPAPELLGGPSVF | |
| | | LFPPKPKDTLMISRTPEVTCVVVDVSHEDP | |
| | | EVKFNWYVDGVEVHNAKTKPREEQYGSTYR | |
| | | VVSVLTVLHQDWLNGKEYKCKVSNKALPAP | |
| | | IEKTISKAKGQPREPQVYTLPPSRDELTKN | |
| | | QVSLSCAVKGFYPSDIAVEWESNGQPENNY | |
| | | KTTPPVLDSDGSFFLVSKLTVDKSRWQQGN | |
| | | VFSCSVMHEALHNHYTQKSLSLSPGKGGSG | |
| | | AWSHPQFEK | |
| | L: | DIQMTQSPSSLSASVGDRVTITCSASQDIS | |
| | | NYLNWYQQKPGKAPKVLIYFTSSLHSGVPS | |
| | | RFSGSGSGTDFTLTISSLQPEDFATYYCQQ | |
| | | YSTVPWTFGQGTKVEIKRTVAAPSVFIFPP | |
| | | SDEQLKSGTASVVCLLNNFYPREAKVQWKV | |
| | | DNALQSGNSQESVTEQDSKDSTYSLSSTLT | |
| | | LSKADYEKHKVYACEVTHQGLSSPVTKSFN | |
| | | RGEC | |
| IL-25 | Knob: | YSHWPSCCPSKGQDTSEELLRWSTVPVPPL | |
| | | EPARPNRHPESCRASEDGPLNSRAISPWRY | |
| | | ELDRDLNRLPQDLYHARCLCPHCVSLQTGS | |
| | | HMDPRGNSELLYHNQTVFYRRPCHGEKGTH | |
| | | KGYCLERRLYRVSLACVCVRPRVMGEPKSC | |
| | | DKTHTCPPCPAPELLGGPSVFLFPPKPKDT | |
| | | LMISRTPEVTCVVVDVSHEDPEVKFNWYVD | |
| | | GVEVHNAKTKPREEQYGSTYRVVSVLTVLH | |
| | | QDWLNGKEYKCKVSNKALPAPIEKTISKAK | |
| | | GQPREPQVYTLPPSRDELTKNQVSLWCLVK | |
| | | GFYPSDIAVEWESNGQPENNYKTTPPVLDS | |
| | | DGSFFLYSKLTVDKSRWQQGNVFSCSVMHE | |
| | | ALHNHYTQKSLSLSPGKGGSHHHHHH | |
| | Hole: | EVQLVESGGGLVQPGGSLRLSCAASGYTFT | |
| | | NYGMNWVRQAPGKGLEWVGWINTYTGEPTY | |
| | | AADFKRRFTFSLDTSKSTAYLQMNSLRAED | |
| | | TAVYYCAKYPHYYGSSHWYFDVWGQGTLVT | |
| | | VSSASTKGPSVFPLAPSSKSTSGGTAALGC | |
| | | LVKDYFPEPVTVSWNSGALTSGVHTFPAVL | |
| | | QSSGLYSLSSVVTVPSSSLGTQTYICNVNH | |
| | | KPSNTKVDKKVEPKSCDKTHTCPPCPAPEL | |
| | | LGGPSVFLFPPKPKDTLMISRTPEVTCVVV | |
| | | DVSHEDPEVKFNWYVDGVEVHNAKTKPREE | |
| | | QYGSTYRVVSVLTVLHQDWLNGKEYKCKVS | |
| | | NKALPAPIEKTISKAKGQPREPQVYTLPPS | |
| | | RDELTKNQVSLSCAVKGFYPSDIAVEWESN | |
| | | GQPENNYKTTPPVLDSDGSFFLVSKLTVDK | |
| | | SRWQQGNVFSCSVMHEALHNHYTQKSLSLS | |
| | | PGKGGSGAWSHPQFEK | |
| | L: | DIQMTQSPSSLSASVGDRVTITCSASQDIS | |
| | | NYLNWYQQKPGKAPKVLIYFTSSLHSGVPS | |
| | | RFSGSGSGTDFTLTISSLQPEDFATYYCQQ | |
| | | YSTVPWTFGQGTKVEIKRTVAAPSVFIFPP | |
| | | SDEQLKSGTASVVCLLNNFYPREAKVQWKV | |
| | | DNALQSGNSQESVTEQDSKDSTYSLSSTLT | |
| | | LSKADYEKHKVYACEVTHQGLSSPVTKSFN | |
| | | RGEC | |
| IL-26 | Knob: | KHKQSSFTKSCYPRGTLSQAVDALYIKAAW | |
| | | LKATIPEDRIKNIRLLKKKTKKQFMKNCQF | |
| | | QEQLLSFFMEDVFGQLQLQGCKKIRFVEDF | |
| | | HSLRQKLSHCISCASSAREMKSITRMKRIF | |
| | | YRIGNKGIYKAISELDILLSWIKKLLESSQ | |
| | | EPKSCDKTHTCPPCPAPELLGGPSVFLFPP | |
| | | KPKDTLMISRTPEVTCVVVDVSHEDPEVKF | |
| | | NWYVDGVEVHNAKTKPREEQYGSTYRVVSV | |
| | | LTVLHQDWLNGKEYKCKVSNKALPAPIEKT | |
| | | ISKAKGQPREPQVYTLPPSRDELTKNQVSL | |
| | | WCLVKGFYPSDIAVEWESNGQPENNYKTTP | |
| | | PVLDSDGSFFLYSKLTVDKSRWQQGNVFSC | |
| | | SVMHEALHNHYTQKSLSLSPGKGGSHHHHH | |
| | | H | |
| | Hole: | EVQLVESGGGLVQPGGSLRLSCAASGYTFT | |
| | | NYGMNWVRQAPGKGLEWVGWINTYTGEPTY | |
| | | AADFKRRFTFSLDTSKSTAYLQMNSLRAED | |
| | | TAVYYCAKYPHYYGSSHWYFDVWGQGTLVT | |
| | | VSSASTKGPSVFPLAPSSKSTSGGTAALGC | |
| | | LVKDYFPEPVTVSWNSGALTSGVHTFPAVL | |
| | | QSSGLYSLSSVVTVPSSSLGTQTYICNVNH | |
| | | KPSNTKVDKKVEPKSCDKTHTCPPCPAPEL | |
| | | LGGPSVFLFPPKPKDTLMISRTPEVTCVVV | |
| | | DVSHEDPEVKFNWYVDGVEVHNAKTKPREE | |
| | | QYGSTYRVVSVLTVLHQDWLNGKEYKCKVS | |
| | | NKALPAPIEKTISKAKGQPREPQVYTLPPS | |
| | | RDELTKNQVSLSCAVKGFYPSDIAVEWESN | |
| | | GQPENNYKTTPPVLDSDGSFFLVSKLTVDK | |
| | | SRWQQGNVFSCSVMHEALHNHYTQKSLSLS | |
| | | PGKGGSGAWSHPQFEK | |
| | L: | DIQMTQSPSSLSASVGDRVTITCSASQDIS | |
| | | NYLNWYQQKPGKAPKVLIYFTSSLHSGVPS | |
| | | RFSGSGSGTDFTLTISSLQPEDFATYYCQQ | |
| | | YSTVPWTFGQGTKVEIKRTVAAPSVFIFPP | |
| | | SDEQLKSGTASVVCLLNNFYPREAKVQWKV | |
| | | DNALQSGNSQESVTEQDSKDSTYSLSSTLT | |
| | | LSKADYEKHKVYACEVTHQGLSSPVTKSFN | |
| | | RGEC | |
| IL-28A | Knob: | VPVARLHGALPDARGCHIAQFKSLSPQELQ | |
| | | AFKRAKDALEESLLLKDCRCHSRLFPRTWD | |
| | | LRQLQVRERPMALEAELALTLKVLEATADT | |
| | | DPALVDVLDQPLHTLHHILSQFRACIQPQP | |
| | | TAGPRTRGRLHHWLYRLQEAPKKESPGCLE | |
| | | ASVTFNLFRLLTRDLNCVASGDLCVEPKSC | |
| | | DKTHTCPPCPAPELLGGPSVFLFPPKPKDT | |
| | | LMISRTPEVTCVVVDVSHEDPEVKFNWYVD | |
| | | GVEVHNAKTKPREEQYGSTYRVVSVLTVLH | |
| | | QDWLNGKEYKCKVSNKALPAPIEKTISKAK | |
| | | GQPREPQVYTLPPSRDELTKNQVSLWCLVK | |
| | | GFYPSDIAVEWESNGQPENNYKTTPPVLDS | |
| | | DGSFFLYSKLTVDKSRWQQGNVFSCSVMHE | |
| | | ALHNHYTQKSLSLSPGKGGSHHHHHH | |
| | Hole: | EVQLVESGGGLVQPGGSLRLSCAASGYTFT | |
| | | NYGMNWVRQAPGKGLEWVGWINTYTGEPTY | |
| | | AADFKRRFTFSLDTSKSTAYLQMNSLRAED | |
| | | TAVYYCAKYPHYYGSSHWYFDVWGQGTLVT | |
| | | VSSASTKGPSVFPLAPSSKSTSGGTAALGC | |
| | | LVKDYFPEPVTVSWNSGALTSGVHTFPAVL | |
| | | QSSGLYSLSSVVTVPSSSLGTQTYICNVNH | |
| | | KPSNTKVDKKVEPKSCDKTHTCPPCPAPEL | |
| | | LGGPSVFLFPPKPKDTLMISRTPEVTCVVV | |
| | | DVSHEDPEVKFNWYVDGVEVHNAKTKPREE | |
| | | QYGSTYRVVSVLTVLHQDWLNGKEYKCKVS | |
| | | NKALPAPIEKTISKAKGQPREPQVYTLPPS | |
| | | RDELTKNQVSLSCAVKGFYPSDIAVEWESN | |
| | | GQPENNYKTTPPVLDSDGSFFLVSKLTVDK | |
| | | SRWQQGNVFSCSVMHEALHNHYTQKSLSLS | |
| | | PGKGGSGAWSHPQFEK | |
| | L: | DIQMTQSPSSLSASVGDRVTITCSASQDIS | |
| | | NYLNWYQQKPGKAPKVLIYFTSSLHSGVPS | |
| | | RFSGSGSGTDFTLTISSLQPEDFATYYCQQ | |
| | | YSTVPWTFGQGTKVEIKRTVAAPSVFIFPP | |
| | | SDEQLKSGTASVVCLLNNFYPREAKVQWKV | |
| | | DNALQSGNSQESVTEQDSKDSTYSLSSTLT | |
| | | LSKADYEKHKVYACEVTHQGLSSPVTKSFN | |
| | | RGEC | |
| IL-31 | Knob: | SHTLPVRLLRPSDDVQKIVEELQSLSKMLL | |
| | | KDVEEEKGVLVSQNYTLPCLSPDAQPPNNI | |
| | | HSPAIRAYLKTIRQLDNKSVIDEIIEHLDK | |
| | | LIFQDAPETNISVPTDTHECKRFILTISQQ | |
| | | FSECMDLALKSLTSGAQQATTEPKSCDKTH | |
| | | TCPPCPAPELLGGPSVFLFPPKPKDTLMIS | |
| | | RTPEVTCVVVDVSHEDPEVKFNWYVDGVEV | |
| | | HNAKTKPREEQYGSTYRVVSVLTVLHQDWL | |
| | | NGKEYKCKVSNKALPAPIEKTISKAKGQPR | |
| | | EPQVYTLPPSRDELTKNQVSLWCLVKGFYP | |
| | | SDIAVEWESNGQPENNYKTTPPVLDSDGSF | |
| | | FLYSKLTVDKSRWQQGNVFSCSVMHEALHN | |
| | | HYTQKSLSLSPGKGGSHHHHHH | |
| | Hole: | EVQLVESGGGLVQPGGSLRLSCAASGYTFT | |
| | | NYGMNWVRQAPGKGLEWVGWINTYTGEPTY | |
| | | AADFKRRFTFSLDTSKSTAYLQMNSLRAED | |
| | | TAVYYCAKYPHYYGSSHWYFDVWGQGTLVT | |
| | | VSSASTKGPSVFPLAPSSKSTSGGTAALGC | |
| | | LVKDYFPEPVTVSWNSGALTSGVHTFPAVL | |
| | | QSSGLYSLSSVVTVPSSSLGTQTYICNVNH | |
| | | KPSNTKVDKKVEPKSCDKTHTCPPCPAPEL | |
| | | LGGPSVFLFPPKPKDTLMISRTPEVTCVVV | |
| | | DVSHEDPEVKFNWYVDGVEVHNAKTKPREE | |
| | | QYGSTYRVVSVLTVLHQDWLNGKEYKCKVS | |
| | | NKALPAPIEKTISKAKGQPREPQVYTLPPS | |
| | | RDELTKNQVSLSCAVKGFYPSDIAVEWESN | |
| | | GQPENNYKTTPPVLDSDGSFFLVSKLTVDK | |
| | | SRWQQGNVFSCSVMHEALHNHYTQKSLSLS | |
| | | PGKGGSGAWSHPQFEK | |
| | L: | DIQMTQSPSSLSASVGDRVTITCSASQDIS | |
| | | NYLNWYQQKPGKAPKVLIYFTSSLHSGVPS | |
| | | RFSGSGSGTDFTLTISSLQPEDFATYYCQQ | |
| | | YSTVPWTFGQGTKVEIKRTVAAPSVFIFPP | |
| | | SDEQLKSGTASVVCLLNNFYPREAKVQWKV | |
| | | DNALQSGNSQESVTEQDSKDSTYSLSSTLT | |
| | | LSKADYEKHKVYACEVTHQGLSSPVTKSFN | |
| | | RGEC | |
| IL-32a | Knob: | MCFPKVLSDDMKKLKARMHQAIERFYDKMQ | |
| | | NAESGRGQVMSSLAELEDDFKEGYLETVAA | |
| | | YYEEQHPELTPLLEKERDGLRCRGNRSPVP | |
| | | DVEDPATEEPGESFCDKSYGAPRGDKEELT | |
| | | PQKCSEPQSSKEPKSCDKTHTCPPCPAPEL | |
| | | LGGPSVFLFPPKPKDTLMISRTPEVTCVVV | |
| | | DVSHEDPEVKFNWYVDGVEVHNAKTKPREE | |
| | | QYGSTYRVVSVLTVLHQDWLNGKEYKCKVS | |
| | | NKALPAPIEKTISKAKGQPREPQVYTLPPS | |
| | | RDELTKNQVSLWCLVKGFYPSDIAVEWESN | |
| | | GQPENNYKTTPPVLDSDGSFFLYSKLTVDK | |
| | | SRWQQGNVFSCSVMHEALHNHYTQKSLSLS | |
| | | PGKGGSHHHHHH | |
| | Hole: | EVQLVESGGGLVQPGGSLRLSCAASGYTFT | |
| | | NYGMNWVRQAPGKGLEWVGWINTYTGEPTY | |
| | | AADFKRRFTFSLDTSKSTAYLQMNSLRAED | |
| | | TAVYYCAKYPHYYGSSHWYFDVWGQGTLVT | |
| | | VSSASTKGPSVFPLAPSSKSTSGGTAALGC | |
| | | LVKDYFPEPVTVSWNSGALTSGVHTFPAVL | |
| | | QSSGLYSLSSVVTVPSSSLGTQTYICNVNH | |
| | | KPSNTKVDKKVEPKSCDKTHTCPPCPAPEL | |
| | | LGGPSVFLFPPKPKDTLMISRTPEVTCVVV | |
| | | DVSHEDPEVKFNWYVDGVEVHNAKTKPREE | |
| | | QYGSTYRVVSVLTVLHQDWLNGKEYKCKVS | |
| | | NKALPAPIEKTISKAKGQPREPQVYTLPPS | |
| | | RDELTKNQVSLSCAVKGFYPSDIAVEWESN | |
| | | GQPENNYKTTPPVLDSDGSFFLVSKLTVDK | |
| | | SRWQQGNVFSCSVMHEALHNHYTQKSLSLS | |
| | | PGKGGSGAWSHPQFEK | |
| | L: | DIQMTQSPSSLSASVGDRVTITCSASQDIS | |
| | | NYLNWYQQKPGKAPKVLIYFTSSLHSGVPS | |
| | | RFSGSGSGTDFTLTISSLQPEDFATYYCQQ | |
| | | YSTVPWTFGQGTKVEIKRTVAAPSVFIFPP | |
| | | SDEQLKSGTASVVC | |
| | | LLNNFYPREAKVQWKVDNALQSGNSQESVT | |
| | | EQDSKDSTYSLSSTLTLSKADYEKHKVYAC | |
| | | EVTHQGLSSPVTKSFNRGEC | |
| IL-33 | Knob: | SITGISPITEYLASLSTYNDQSITFALEDE | |
| | | SYEIYVEDLKKDEKKDKVLLSYYESQHPSN | |
| | | ESGDGVDGKMLMVTLSPTKDFWLHANNKEH | |
| | | SVELHKCEKPLPDQAFFVLHNMHSNCVSFE | |
| | | CKTDPGVFIGVKDNHLALIKVDSSENLCTE | |
| | | NILFKLSETEPKSCDKTHTCPPCPAPELLG | |
| | | GPSVFLFPPKPKDTLMISRTPEVTCVVVDV | |
| | | SHEDPEVKFNWYVDGVEVHNAKTKPREEQY | |
| | | GSTYRVVSVLTVLHQDWLNGKEYKCKVSNK | |
| | | ALPAPIEKTISKAKGQPREPQVYTLPPSRD | |
| | | ELTKNQVSLWCLVKGFYPSDIAVEWESNGQ | |
| | | PENNYKTTPPVLDSDGSFFLYSKLTVDKSR | |
| | | WQQGNVFSCSVMHEALHNHYTQKSLSLSPG | |
| | | KGGSHHHHHH | |
| | Hole: | EVQLVESGGGLVQPGGSLRLSCAASGYTFT | |
| | | NYGMNWVRQAPGKGLEWVGWINTYTGEPTY | |
| | | AADFKRRFTFSLDTSKSTAYLQMNSLRAED | |
| | | TAVYYCAKYPHYYGSSHWYFDVWGQGTLVT | |
| | | VSSASTKGPSVFPLAPSSKSTSGGTAALGC | |
| | | LVKDYFPEPVTVSWNSGALTSGVHTFPAVL | |
| | | QSSGLYSLSSVVTVPSSSLGTQTYICNVNH | |
| | | KPSNTKVDKKVEPKSCDKTHTCPPCPAPEL | |
| | | LGGPSVFLFPPKPKDTLMISRTPEVTCVVV | |
| | | DVSHEDPEVKFNWYVDGVEVHNAKTKPREE | |
| | | QYGSTYRVVSVLTVLHQDWLNGKEYKCKVS | |
| | | NKALPAPIEKTISKAKGQPREPQVYTLPPS | |
| | | RDELTKNQVSLSCAVKGFYPSDIAVEWESN | |
| | | GQPENNYKTTPPVLDSDGSFFLVSKLTVDK | |
| | | SRWQQGNVFSCSVMHEALHNHYTQKSLSLS | |
| | | PGKGGSGAWSHPQFEK | |
| | L: | DIQMTQSPSSLSASVGDRVTITCSASQDIS | |
| | | NYLNWYQQKPGKAPKVLIYFTSSLHSGVPS | |
| | | RFSGSGSGTDFTLTISSLQPEDFATYYCQQ | |
| | | YSTVPWTFGQGTKVEIKRTVAAPSVFIFPP | |
| | | SDEQLKSGTASVVCLLNNFYPREAKVQWKV | |
| | | DNALQSGNSQESVTEQDSKDSTYSLSSTLT | |
| | | LSKADYEKHKVYACEVTHQGLSSPVTKSFN | |
| | | RGEC | |
| IL-34 | Knob: | NEPLEMWPLTQNEECTVTGFLRDKLQYRSR | |
| | | LQYMKHYFPINYKISVPYEGVFRIANVTRL | |
| | | QRAQVSERELRYLWVLVSLSATESVQDVLL | |
| | | EGHPSWKYLQEVETLLLNVQQGLTDVEVSP | |
| | | KVESVLSLLNAPGPNLKLVRPKALLDNCFR | |
| | | VMELLYCSCCKQSSVLNWQDCEVPSPQSCS | |
| | | PEPSLQYAATQLYPPPPWSPSSPPHSTGSV | |
| | | RPVRAQGEGLLPEPKSCDKTHTCPPCPAPE | |
| | | LLGGPSVFLFPPKPKDTLMISRTPEVTCVV | |
| | | VDVSHEDPEVKFNWYVDGVEVHNAKTKPRE | |
| | | EQYGSTYRVVSVLTVLHQDWLNGKEYKCKV | |
| | | SNKALPAPIEKTISKAKGQPREPQVYTLPP | |
| | | SRDELTKNQVSLWCLVKGFYPSDIAVEWES | |
| | | NGQPENNYKTTPPVLDSDGSFFLYSKLTVD | |
| | | KSRWQQGNVFSCSVMHEALHNHYTQKSLSL | |
| | | SPGKGGSHHHHHH | |
| | Hole: | EVQLVESGGGLVQPGGSLRLSCAASGYTFT | |
| | | NYGMNWVRQAPGKGLEWVGWINTYTGEPTY | |
| | | AADFKRRFTFSLDTSKSTAYLQMNSLRAED | |
| | | TAVYYCAKYPHYYGSSHWYFDVWGQGTLVT | |
| | | VSSASTKGPSVFPLAPSSKSTSGGTAALGC | |
| | | LVKDYFPEPVTVSWNSGALTSGVHTFPAVL | |
| | | QSSGLYSLSSVVTVPSSSLGTQTYICNVNH | |
| | | KPSNTKVDKKVEPKSCDKTHTCPPCPAPEL | |
| | | LGGPSVFLFPPKPKDTLMISRTPEVTCVVV | |
| | | DVSHEDPEVKFNWYVDGVEVHNAKTKPREE | |
| | | Q | |
| | | YGSTYRVVSVLTVLHQDWLNGKEYKCKVSN | |
| | | KALPAPIEKTISKAKGQPREPQVYTLPPSR | |
| | | DELTKNQVSLSCAVKGFYPSDIAVEWESNG | |
| | | QPENNYKTTPPVLDSDGSFFLVSKLTVDKS | |
| | | RWQQGNVFSCSVMHEALHNHYTQKSLSLSP | |
| | | GKGGSGAWSHPQFEK | |
| | L: | DIQMTQSPSSLSASVGDRVTITCSASQDIS | |
| | | NYLNWYQQKPGKAPKVLIYFTSSLHSGVPS | |
| | | RFSGSGSGTDFTLTISSLQPEDFATYYCQQ | |
| | | YSTVPWTFGQGTKVEIKRTVAAPSVFIFPP | |
| | | SDEQLKSGTASVVCLLNNFYPREAKVQWKV | |
| | | DNALQSGNSQESVTEQDSKDSTYSLSSTLT | |
| | | LSKADYEKHKVYACEVTHQGLSSPVTKSFN | |
| | | RGEC | |
| IL-36A | Knob: | KIDTPQQGSIQDINHRVWVLQDQTLIAVPR | |
| | | KDRMSPVTIALISCRHVETLEKDRGNPIYL | |
| | | GLNGLNLCLMCAKVGDQPTLQLKEKDIMDL | |
| | | YNQPEPVKSFLFYHSQSGRNSTFESVAFPG | |
| | | WFIAVSSEGGCPLILTQELGKANTTDFGLT | |
| | | MLFEPKSCDKTHTCPPCPAPELLGGPSVFL | |
| | | FPPKPKDTLMISRTPEVTCVVVDVSHEDPE | |
| | | VKFNWYVDGVEVHNAKTKPREEQYGSTYRV | |
| | | VSVLTVLHQDWLNGKEYKCKVSNKALPAPI | |
| | | EKTISKAKGQPREPQVYTLPPSRDELTKNQ | |
| | | VSLWCLVKGFYPSDIAVEWESNGQPENNYK | |
| | | TTPPVLDSDGSFFLYSKLTVDKSRWQQGNV | |
| | | FSCSVMHEALHNHYTQKSLSLSPGKGGSHH | |
| | | HHHH | |
| | Hole: | EVQLVESGGGLVQPGGSLRLSCAASGYTFT | |
| | | NYGMNWVRQAPGKGLEWVGWINTYTGEPTY | |
| | | AADFKRRFTFSLDTSKSTAYLQMNSLRAED | |
| | | TAVYYCAKYPHYYGSSHWYFDVWGQGTLVT | |
| | | VSSASTKGPSVFPLAPSSKSTSGGTAALGC | |
| | | LVKDYFPEPVTVSWNSGALTSGVHTFPAVL | |
| | | QSSGLYSLSSVVTVPSSSLGTQTYICNVNH | |
| | | KPSNTKVDKKVEPKSCDKTHTCPPCPAPEL | |
| | | LGGPSVFLFPPKPKDTLMISRTPEVTCVVV | |
| | | DVSHEDPEVKFNWYVDGVEVHNAKTKPREE | |
| | | QYGSTYRVVSVLTVLHQDWLNGKEYKCKVS | |
| | | NKALPAPIEKTISKAKGQPREPQVYTLPPS | |
| | | RDELTKNQVSLSCAVKGFYPSDIAVEWESN | |
| | | GQPENNYKTTPPVLDSDGSFFLVSKLTVDK | |
| | | SRWQQGNVFSCSVMHEALHNHYTQKSLSLS | |
| | | PGKGGSGAWSHPQFEK | |
| | L: | DIQMTQSPSSLSASVGDRVTITCSASQDIS | |
| | | NYLNWYQQKPGKAPKVLIYFTSSLHSGVPS | |
| | | RFSGSGSGTDFTLTISSLQPEDFATYYCQQ | |
| | | YSTVPWTFGQGTKVEIKRTVAAPSVFIFPP | |
| | | SDEQLKSGTASVVCLLNNFYPREAKVQWKV | |
| | | DNALQSGNSQESVTEQDSKDSTYSLSSTLT | |
| | | LSKADYEKHKVYACEVTHQGLSSPVTKSFN | |
| | | RGEC | |
| IL-36RA | Knob: | VLSGALCFRMKDSALKVLYLHNNQLLAGGL | |
| | | HAGKVIKGEEISVVPNRWLDASLSPVILGV | |
| | | QGGSQCLSCGVGQEPTLTLEPVNIMELYLG | |
| | | AKESKSFTFYRRDMGLTSSFESAAYPGWFL | |
| | | CTVPEADQPVRLTQLPENGGWNAPITDFYF | |
| | | QQCDEPKSCDKTHTCPPCPAPELLGGPSVF | |
| | | LFPPKPKDTLMISRTPEVTCVVVDVSHEDP | |
| | | EVKFNWYVDGVEVHNAKTKPREEQYGSTYR | |
| | | VVSVLTVLHQDWLNGKEYKCKVSNKALPAP | |
| | | IEKTISKAKGQPREPQVYTLPPSRDELTKN | |
| | | QVSLWCLVKGFYPSDIAVEWESNGQPENNY | |
| | | KTTPPVLDSDGSFFLYSKLTVDKSRWQQGN | |
| | | VFSCSVMHEALHNHYTQKSLSLSPGKGGSH | |
| | | HHHHH | |
| | Hole: | EVQLVESGGGLVQPGGSLRLSCAASGYTFT | |
| | | NYGMNWVRQAPGKGLEWVGWINTYTGEPTY | |
| | | AADFKRRFTFSLDTSKSTAYLQMNSLRAED | |
| | | TAVYYCAKYPHYYGSSHWYFDVWGQGTLVT | |
| | | VSSASTKGPSVFPLAPSSKSTSGGTAALGC | |
| | | LVKDYFPEPVTVSWNSGALTSGVHTFPAVL | |
| | | QSSGLYSLSSVVTVPSSSLGTQTYICNVNH | |
| | | KPSNTKVDKKVEPKSCDKTHTCPPCPAPEL | |
| | | LGGPSVFLFPPKPKDTLMISRTPEVTCVVV | |
| | | DVSHEDPEVKFNWYVDGVEVHNAKTKPREE | |
| | | QYGSTYRVVSVLTVLHQDWLNGKEYKCKVS | |
| | | NKALPAPIEKTISKAKGQPREPQVYTLPPS | |
| | | RDELTKNQVSLSCAVKGFYPSDIAVEWESN | |
| | | GQPENNYKTTPPVLDSDGSFFLVSKLTVDK | |
| | | SRWQQGNVFSCSVMHEALHNHYTQKSLSLS | |
| | | PGKGGSGAWSHPQFEK | |
| | L: | DIQMTQSPSSLSASVGDRVTITCSASQDIS | |
| | | NYLNWYQQKPGKAPKVLIYFTSSLHSGVPS | |
| | | RFSGSGSGTDFTLTISSLQPEDFATYYCQQ | |
| | | YSTVPWTFGQGTKVEIKRTVAAPSVFIFPP | |
| | | SDEQLKSGTASVVCLLNNFYPREAKVQWKV | |
| | | DNALQSGNSQESVTEQDSKDSTYSLSSTLT | |
| | | LSKADYEKHKVYACEVTHQGLSSPVTKSFN | |
| | | RGEC | |
| IL-37 | Knob: | VHTSPKVKNLNPKKFSIHDQDHKVLVLDSG | |
| | | NLIAVPDKNYIRPEIFFALASSLSSASAEK | |
| | | GSPILLGVSKGEFCLYCDKDKGQSHPSLQL | |
| | | KKEKLMKLAAQKESARRPFIFYRAQVGSWN | |
| | | MLESAAHPGWFICTSCNCNEPVGVTDKFEN | |
| | | RKHIEFSFQPVCKAEMSPSEVSDEPKSCDK | |
| | | THTCPPCPAPELLGGPSVFLFPPKPKDTLM | |
| | | ISRTPEVTCVVVDVSHEDPEVKFNWYVDGV | |
| | | EVHNAKTKPREEQYGSTYRVVSVLTVLHQD | |
| | | WLNGKEYKCKVSNKALPAPIEKTISKAKGQ | |
| | | PREPQVYTLPPSRDELTKNQVSLWCLVKGF | |
| | | YPSDIAVEWESNGQPENNYKTTPPVLDSDG | |
| | | SFFLYSKLTVDKSRWQQGNVFSCSVMHEAL | |
| | | HNHYTQKSLSLSPGKGGSHHHHHH | |
| | Hole: | EVQLVESGGGLVQPGGSLRLSCAASGYTFT | |
| | | NYGMNWVRQAPGKGLEWVGWINTYTGEPTY | |
| | | AADFKRRFTFSLDTSKSTAYLQMNSLRAED | |
| | | TAVYYCAKYPHYYGSSHWYFDVWGQGTLVT | |
| | | VSSASTKGPSVFPLAPSSKSTSGGTAALGC | |
| | | LVKDYFPEPVTVSWNSGALTSGVHTFPAVL | |
| | | QSSGLYSLSSVVTVPSSSLGTQTYICNVNH | |
| | | KPSNTKVDKKVEPKSCDKTHTCPPCPAPEL | |
| | | LGGPSVFLFPPKPKDTLMISRTPEVTCVVV | |
| | | DVSHEDPEVKFNWYVDGVEVHNAKTKPREE | |
| | | QYGSTYRVVSVLTVLHQDWLNGKEYKCKVS | |
| | | NKALPAPIEKTISKAKGQPREPQVYTLPPS | |
| | | RDELTKNQVSLSCAVKGFYPSDIAVEWESN | |
| | | GQPENNYKTTPPVLDSDGSFFLVSKLTVDK | |
| | | SRWQQGNVFSCSVMHEALHNHYTQKSLSLS | |
| | | PGKGGSGAWSHPQFEK | |
| | L: | DIQMTQSPSSLSASVGDRVTITCSASQDIS | |
| | | NYLNWYQQKPGKAPKVLIYFTSSLHSGVPS | |
| | | RFSGSGSGTDFTLTISSLQPEDFATYYCQQ | |
| | | YSTVPWTFGQGTKVEIKRTVAAPSVFIFPP | |
| | | SDEQLKSGTASVVCLLNNFYPREAKVQWKV | |
| | | DNALQSGNSQESVTEQDSKDSTYSLSSTLT | |
| | | LSKADYEKHKVYACEVTHQGLSSPVTKSFN | |
| | | RGEC | |
| IL-38 | Knob: | CSLPMARYYIIKYADQKALYTRDGQLLVGD | |
| | | PVADNCCAEKICILPNRGLARTKVPIFLGI | |
| | | QGGSRCLACVETEEGPSLQLEDVNIEELYK | |
| | | GGEEATRFTFFQSSSGSAFRLEAAAWPGWF | |
| | | LCGPAEPQQPVQLTKESEPSARTKFYFEQS | |
| | | WEPKSCDKTHTCPPCPAPELLGGPS | |
| | | VFLFPPKPKDTLMISRTPEVTCVVVDVSHE | |
| | | DPEVKFNWYVDGVEVHNAKTKPREEQYGST | |
| | | YRVVSVLTVLHQDWLNGKEYKCKVSNKALP | |
| | | APIEKTISKAKGQPREPQVYTLPPSRDELT | |
| | | KNQVSLWCLVKGFYPSDIAVEWESNGQPEN | |
| | | NYKTTPPVLDSDGSFFLYSKLTVDKSRWQQ | |
| | | GNVFSCSVMHEALHNHYTQKSLSLSPGKGG | |
| | | SHHHHHH | |
| | Hole: | EVQLVESGGGLVQPGGSLRLSCAASGYTFT | |
| | | NYGMNWVRQAPGKGLEWVGWINTYTGEPTY | |
| | | AADFKRRFTFSLDTSKSTAYLQMNSLRAED | |
| | | TAVYYCAKYPHYYGSSHWYFDVWGQGTLVT | |
| | | VSSASTKGPSVFPLAPSSKSTSGGTAALGC | |
| | | LVKDYFPEPVTVSWNSGALTSGVHTFPAVL | |
| | | QSSGLYSLSSVVTVPSSSLGTQTYICNVNH | |
| | | KPSNTKVDKKVEPKSCDKTHTCPPCPAPEL | |
| | | LGGPSVFLFPPKPKDTLMISRTPEVTCVVV | |
| | | DVSHEDPEVKFNWYVDGVEVHNAKTKPREE | |
| | | QYGSTYRVVSVLTVLHQDWLNGKEYKCKVS | |
| | | NKALPAPIEKTISKAKGQPREPQVYTLPPS | |
| | | RDELTKNQVSLSCAVKGFYPSDIAVEWESN | |
| | | GQPENNYKTTPPVLDSDGSFFLVSKLTVDK | |
| | | SRWQQGNVFSCSVMHEALHNHYTQKSLSLS | |
| | | PGKGGSGAWSHPQFEK | |
| | L: | DIQMTQSPSSLSASVGDRVTITCSASQDIS | |
| | | NYLNWYQQKPGKAPKVLIYFTSSLHSGVPS | |
| | | RFSGSGSGTDFTLTISSLQPEDFATYYCQQ | |
| | | YSTVPWTFGQGTKVEIKRTVAAPSVFIFPP | |
| | | SDEQLKSGTASVVCLLNNFYPREAKVQWKV | |
| | | DNALQSGNSQESVTEQDSKDSTYSLSSTLT | |
| | | LSKADYEKHKVYACEVTHQGLSSPVTKSFN | |
| | | RGEC | |
| IFN-α | Knob: | CDLPETHSLDNRRTLMLLAQMSRISPSSCL | |
| | | MDRHDFGFPQEEFDGNQFQKAPAISVLHEL | |
| | | IQQIFNLFTTKDSSAAWDEDLLDKFCTELY | |
| | | QQLNDLEACVMQEERVGETPLMNADSILAV | |
| | | KKYFRRITLYLTEKKYSPCAWEVVRAEIMR | |
| | | SLSLSTNLQERLRRKEEPKSCDKTHTCPPC | |
| | | PAPELLGGPSVFLFPPKPKDTLMISRTPEV | |
| | | TCVVVDVSHEDPEVKFNWYVDGVEVHNAKT | |
| | | KPREEQYGSTYRVVSVLTVLHQDWLNGKEY | |
| | | KCKVSNKALPAPIEKTISKAKGQPREPQVY | |
| | | TLPPSRDELTKNQVSLWCLVKGFYPSDIAV | |
| | | EWESNGQPENNYKTTPPVLDSDGSFFLYSK | |
| | | LTVDKSRWQQGNVFSCSVMHEALHNHYTQK | |
| | | SLSLSPGKGGSHHHHHH | |
| | Hole: | EVQLVESGGGLVQPGGSLRLSCAASGYTFT | |
| | | NYGMNWVRQAPGKGLEWVGWINTYTGEPTY | |
| | | AADFKRRFTFSLDTSKSTAYLQMNSLRAED | |
| | | TAVYYCAKYPHYYGSSHWYFDVWGQGTLVT | |
| | | VSSASTKGPSVFPLAPSSKSTSGGTAALGC | |
| | | LVKDYFPEPVTVSWNSGALTSGVHTFPAVL | |
| | | QSSGLYSLSSVVTVPSSSLGTQTYICNVNH | |
| | | KPSNTKVDKKVEPKSCDKTHTCPPCPAPEL | |
| | | LGGPSVFLFPPKPKDTLMISRTPEVTCVVV | |
| | | DVSHEDPEVKFNWYVDGVEVHNAKTKPREE | |
| | | QYGSTYRVVSVLTVLHQDWLNGKEYKCKVS | |
| | | NKALPAPIEKTISKAKGQPREPQVYTLPPS | |
| | | RDELTKNQVSLSCAVKGFYPSDIAVEWESN | |
| | | GQPENNYKTTPPVLDSDGSFFLVSKLTVDK | |
| | | SRWQQGNVFSCSVMHEALHNHYTQKSLSLS | |
| | | PGKGGSGAWSHPQFEK | |
| | L: | DIQMTQSPSSLSASVGDRVTITCSASQDIS | |
| | | NYLNWYQQKPGKAPKVLIYFTSSLHSGVPS | |
| | | RFSGSGSGTDFTLTISSLQPEDFATYYCQQ | |
| | | YSTVPWTFGQGTKVEIKRTVAAPSVFIFPP | |
| | | SDEQLKSGTASVVC | |
| | | LLNNFYPREAKVQWKVDNALQSGNSQESVT | |
| | | EQDSKDSTYSLSSTLTLSKADYEKHKVYAC | |
| | | EVTHQGLSSPVTKSFNRGEC | |
| IFN-β | Knob: | MSYNLLGFLQRSSNFQCQKLLWQLNGRLEY | |
| | | CLKDRMNFDIPEEIKQLQQFQKEDAALTIY | |
| | | EMLQNIFAIFRQDSSSTGWNETIVENLLAN | |
| | | VYHQINHLKTVLEEKLEKEDFTRGKLMSSL | |
| | | HLKRYYGRILHYLKAKEYSHCAWTIVRVEI | |
| | | LRNFYFINRLTGYLRNEPKSCDKTHTCPPC | |
| | | PAPELLGGPSVFLFPPKPKDTLMISRTPEV | |
| | | TCVVVDVSHEDPEVKFNWYVDGVEVHNAKT | |
| | | KPREEQYGSTYRVVSVLTVLHQDWLNGKEY | |
| | | KCKVSNKALPAPIEKTISKAKGQPREPQVY | |
| | | TLPPSRDELTKNQVSLWCLVKGFYPSDIAV | |
| | | EWESNGQPENNYKTTPPVLDSDGSFFLYSK | |
| | | LTVDKSRWQQGNVFSCSVMHEALHNHYTQK | |
| | | SLSLSPGKGGSHHHHHH | |
| | Hole: | EVQLVESGGGLVQPGGSLRLSCAASGYTFT | |
| | | NYGMNWVRQAPGKGLEWVGWINTYTGEPTY | |
| | | AADFKRRFTFSLDTSKSTAYLQMNSLRAED | |
| | | TAVYYCAKYPHYYGSSHWYFDVWGQGTLVT | |
| | | VSSASTKGPSVFPLAPSSKSTSGGTAALGC | |
| | | LVKDYFPEPVTVSWNSGALTSGVHTFPAVL | |
| | | QSSGLYSLSSVVTVPSSSLGTQTYICNVNH | |
| | | KPSNTKVDKKVEPKSCDKTHTCPPCPAPEL | |
| | | LGGPSVFLFPPKPKDTLMISRTPEVTCVVV | |
| | | DVSHEDPEVKFNWYVDGVEVHNAKTKPREE | |
| | | QYGSTYRVVSVLTVLHQDWLNGKEYKCKVS | |
| | | NKALPAPIEKTISKAKGQPREPQVYTLPPS | |
| | | RDELTKNQVSLSCAVKGFYPSDIAVEWESN | |
| | | GQPENNYKTTPPVLDSDGSFFLVSKLTVDK | |
| | | SRWQQGNVFSCSVMHEALHNHYTQKSLSLS | |
| | | PGKGGSGAWSHPQFEK | |
| | L: | DIQMTQSPSSLSASVGDRVTITCSASQDIS | |
| | | NYLNWYQQKPGKAPKVLIYFTSSLHSGVPS | |
| | | RFSGSGSGTDFTLTISSLQPEDFATYYCQQ | |
| | | YSTVPWTFGQGTKVEIKRTVAAPSVFIFPP | |
| | | SDEQLKSGTASVVCLLNNFYPREAKVQWKV | |
| | | DNALQSGNSQESVTEQDSKDSTYSLSSTLT | |
| | | LSKADYEKHKVYACEVTHQGLSSPVTKSFN | |
| | | RGEC | |
| IFN-γ | Knob: | QDPYVKEAENLKKYFNAGHSDVADNGTLFL | |
| | | GILKNWKEESDRKIMQSQIVSFYFKLFKNF | |
| | | KDDQSIQKSVETIKEDMNVKFFNSNKKKRD | |
| | | DFEKLTNYSVTDLNVQRKAIHELIQVMAEL | |
| | | SPAAKTGKRKRSQMLFRGEPKSCDKTHTCP | |
| | | PCPAPELLGGPSVFLFPPKPKDTLMISRTP | |
| | | EVTCVVVDVSHEDPEVKFNWYVDGVEVHNA | |
| | | KTKPREEQYGSTYRVVSVLTVLHQDWLNGK | |
| | | EYKCKVSNKALPAPIEKTISKAKGQPREPQ | |
| | | VYTLPPSRDELTKNQVSLWCLVKGFYPSDI | |
| | | AVEWESNGQPENNYKTTPPVLDSDGSFFLY | |
| | | SKLTVDKSRWQQGNVFSCSVMHEALHNHYT | |
| | | QKSLSLSPGKGGSHHHHHH | |
| | Hole: | EVQLVESGGGLVQPGGSLRLSCAASGYTFT | |
| | | NYGMNWVRQAPGKGLEWVGWINTYTGEPTY | |
| | | AADFKRRFTFSLDTSKSTAYLQMNSLRAED | |
| | | TAVYYCAKYPHYYGSSHWYFDVWGQGTLVT | |
| | | VSSASTKGPSVFPLAPSSKSTSGGTAALGC | |
| | | LVKDYFPEPVTVSWNSGALTSGVHTFPAVL | |
| | | QSSGLYSLSSVVTVPSSSLGTQTYICNVNH | |
| | | KPSNTKVDKKVEPKSCDKTHTCPPCPAPEL | |
| | | LGGPSVFLFPPKPKDTLMISRTPEVTCVVV | |
| | | DVSHEDPEVKFNWYVDGVEVHNAKTKPREE | |
| | | QYGSTYRVVSVLTVLHQDWLNGKEYKCKVS | |
| | | NKALPAPIEKTISKAKGQPREPQVYTLPPS | |
| | | RDELTKNQVSLSCAVKGFYPSDIAVEW | |
| | | ESNGQPENNYKTTPPVLDSDGSFFLVSKLT | |
| | | VDKSRWQQGNVFSCSVMHEALHNHYTQKSL | |
| | | SLSPGKGGSGAWSHPQFEK | |
| | L: | DIQMTQSPSSLSASVGDRVTITCSASQDIS | |
| | | NYLNWYQQKPGKAPKVLIYFTSSLHSGVPS | |
| | | RESGSGSGTDFTLTISSLQPEDFATYYCQQ | |
| | | YSTVPWTFGQGTKVEIKRTVAAPSVFIFPP | |
| | | SDEQLKSGTASVVCLLNNFYPREAKVQWKV | |
| | | DNALQSGNSQESVTEQDSKDSTYSLSSTLT | |
| | | LSKADYEKHKVYACEVTHQGLSSPVTKSFN | |
| | | RGEC | |
| TGF-β | Knob: | ALDTNYCFSSTEKNCCVRQLYIDFRKDLGW | |
| | | KWIHEPKGYHANFCLGPCPYIWSLDTQYSK | |
| | | VLALYNQHNPGASAAPCCVPQALEPLPIVY | |
| | | YVGRKPKVEQLSNMIVRSCKCSEPKSCDKT | |
| | | HTCPPCPAPELLGGPSVFLFPPKPKDTLMI | |
| | | SRTPEVTCVVVDVSHEDPEVKFNWYVDGVE | |
| | | VHNAKTKPREEQYGSTYRVVSVLTVLHQDW | |
| | | LNGKEYKCKVSNKALPAPIEKTISKAKGQP | |
| | | REPQVYTLPPSRDELTKNQVSLWCLVKGFY | |
| | | PSDIAVEWESNGQPENNYKTTPPVLDSDGS | |
| | | FFLYSKLTVDKSRWQQGNVFSCSVMHEALH | |
| | | NHYTQKSLSLSPGKGGSHHHHHH | |
| | Hole: | EVQLVESGGGLVQPGGSLRLSCAASGYTFT | |
| | | NYGMNWVRQAPGKGLEWVGWINTYTGEPTY | |
| | | AADFKRRFTFSLDTSKSTAYLQMNSLRAED | |
| | | TAVYYCAKYPHYYGSSHWYFDVWGQGTLVT | |
| | | VSSASTKGPSVFPLAPSSKSTSGGTAALGC | |
| | | LVKDYFPEPVTVSWNSGALTSGVHTFPAVL | |
| | | QSSGLYSLSSVVTVPSSSLGTQTYICNVNH | |
| | | KPSNTKVDKKVEPKSCDKTHTCPPCPAPEL | |
| | | LGGPSVFLFPPKPKDTLMISRTPEVTCVVV | |
| | | DVSHEDPEVKFNWYVDGVEVHNAKTKPREE | |
| | | QYGSTYRVVSVLTVLHQDWLNGKEYKCKVS | |
| | | NKALPAPIEKTISKAKGQPREPQVYTLPPS | |
| | | RDELTKNQVSLSCAVKGFYPSDIAVEWESN | |
| | | GQPENNYKTTPPVLDSDGSFFLVSKLTVDK | |
| | | SRWQQGNVFSCSVMHEALHNHYTQKSLSLS | |
| | | PGKGGSGAWSHPQFEK | |
| | L: | DIQMTQSPSSLSASVGDRVTITCSASQDIS | |
| | | NYLNWYQQKPGKAPKVLIYFTSSLHSGVPS | |
| | | RFSGSGSGTDFTLTISSLQPEDFATYYCQQ | |
| | | YSTVPWTFGQGTKVEIKRTVAAPSVFIFPP | |
| | | SDEQLKSGTASVVCLLNNFYPREAKVQWKV | |
| | | DNALQSGNSQESVTEQDSKDSTYSLSSTLT | |
| | | LSKADYEKHKVYACEVTHQGLSSPVTKSFN | |
| | | RGEC | |
| TNF-α | Knob: | GPQREEFPRDLSLISPLAQAVRSSSRTPSD | |
| | | KPVAHVVANPQAEGQLQWLNRRANALLANG | |
| | | VELRDNQLVVPSEGLYLIYSQVLFKGQGCP | |
| | | STHVLLTHTISRIAVSYQTKVNLLSAIKSP | |
| | | CQRETPEGAEAKPWYEPIYLGGVFQLEKGD | |
| | | RLSAEINRPDYLDFAESGQVYFGIIALEPK | |
| | | SCDKTHTCPPCPAPELLGGPSVFLFPPKPK | |
| | | DTLMISRTPEVTCVVVDVSHEDPEVKFNWY | |
| | | VDGVEVHNAKTKPREEQYGSTYRVVSVLTV | |
| | | LHQDWLNGKEYKCKVSNKALPAPIEKTISK | |
| | | AKGQPREPQVYTLPPSRDELTKNQVSLWCL | |
| | | VKGFYPSDIAVEWESNGQPENNYKTTPPVL | |
| | | DSDGSFFLYSKLTVDKSRWQQGNVFSCSVM | |
| | | HEALHNHYTQKSLSLSPGKGGSHHHHHH | |
| | Hole: | EVQLVESGGGLVQPGGSLRLSCAASGYTFT | |
| | | NYGMNWVRQAPGKGLEWVGWINTYTGEPTY | |
| | | AADFKRRFTFSLDTSKSTAYLQMNSLRAED | |
| | | TAVYYCAKYPHYYGSSHWYFDVWGQGTLVT | |
| | | VSSASTKGPSVFPLAPSSKSTSGGTAALGC | |
| | | LVKDYFPEPVTVSWNSGALTS | |
| | | GVHTFPAVLQSSGLYSLSSVVTVPSSSLGT | |
| | | QTYICNVNHKPSNTKVDKKVEPKSCDKTHT | |
| | | CPPCPAPELLGGPSVFLFPPKPKDTLMISR | |
| | | TPEVTCVVVDVSHEDPEVKFNWYVDGVEVH | |
| | | NAKTKPREEQYGSTYRVVSVLTVLHQDWLN | |
| | | GKEYKCKVSNKALPAPIEKTISKAKGQPRE | |
| | | PQVYTLPPSRDELTKNQVSLSCAVKGFYPS | |
| | | DIAVEWESNGQPENNYKTTPPVLDSDGSFF | |
| | | LVSKLTVDKSRWQQGNVFSCSVMHEALHNH | |
| | | YTQKSLSLSPGKGGSGAWSHPQFEK | |
| | L: | DIQMTQSPSSLSASVGDRVTITCSASQDIS | |
| | | NYLNWYQQKPGKAPKVLIYFTSSLHSGVPS | |
| | | RESGSGSGTDFTLTISSLQPEDFATYYCQQ | |
| | | YSTVPWTFGQGTKVEIKRTVAAPSVFIFPP | |
| | | SDEQLKSGTASVVCLLNNFYPREAKVQWKV | |
| | | DNALQSGNSQESVTEQDSKDSTYSLSSTLT | |
| | | LSKADYEKHKVYACEVTHQGLSSPVTKSFN | |
| | | RGEC | |
| CXCL1 | Knob: | ASVATELRCQCLQTLQGIHPKNIQSVNVKS | |
| | | PGPHCAQTEVIATLKNGRKACLNPASPIVK | |
| | | KIIEKMLNSDKSNEPKSCDKTHTCPPCPAP | |
| | | ELLGGPSVFLFPPKPKDTLMISRTPEVTCV | |
| | | VVDVSHEDPEVKFNWYVDGVEVHNAKTKPR | |
| | | EEQYGSTYRVVSVLTVLHQDWLNGKEYKCK | |
| | | VSNKALPAPIEKTISKAKGQPREPQVYTLP | |
| | | PSRDELTKNQVSLWCLVKGFYPSDIAVEWE | |
| | | SNGQPENNYKTTPPVLDSDGSFFLYSKLTV | |
| | | DKSRWQQGNVFSCSVMHEALHNHYTQKSLS | |
| | | LSPGKGGSHHHHHH | |
| | Hole: | EVQLVESGGGLVQPGGSLRLSCAASGYTFT | |
| | | NYGMNWVRQAPGKGLEWVGWINTYTGEPTY | |
| | | AADFKRRFTFSLDTSKSTAYLQMNSLRAED | |
| | | TAVYYCAKYPHYYGSSHWYFDVWGQGTLVT | |
| | | VSSASTKGPSVFPLAPSSKSTSGGTAALGC | |
| | | LVKDYFPEPVTVSWNSGALTSGVHTFPAVL | |
| | | QSSGLYSLSSVVTVPSSSLGTQTYICNVNH | |
| | | KPSNTKVDKKVEPKSCDKTHTCPPCPAPEL | |
| | | LGGPSVFLFPPKPKDTLMISRTPEVTCVVV | |
| | | DVSHEDPEVKFNWYVDGVEVHNAKTKPREE | |
| | | QYGSTYRVVSVLTVLHQDWLNGKEYKCKVS | |
| | | NKALPAPIEKTISKAKGQPREPQVYTLPPS | |
| | | RDELTKNQVSLSCAVKGFYPSDIAVEWESN | |
| | | GQPENNYKTTPPVLDSDGSFFLVSKLTVDK | |
| | | SRWQQGNVFSCSVMHEALHNHYTQKSLSLS | |
| | | PGKGGSGAWSHPQFEK | |
| | L: | DIQMTQSPSSLSASVGDRVTITCSASQDIS | |
| | | NYLNWYQQKPGKAPKVLIYFTSSLHSGVPS | |
| | | RFSGSGSGTDFTLTISSLQPEDFATYYCQQ | |
| | | YSTVPWTFGQGTKVEIKRTVAAPSVFIFPP | |
| | | SDEQLKSGTASVVCLLNNFYPREAKVQWKV | |
| | | DNALQSGNSQESVTEQDSKDSTYSLSSTLT | |
| | | LSKADYEKHKVYACEVTHQGLSSPVTKSFN | |
| | | RGEC | |
| CXCL2 | Knob: | APLATELRCQCLQTLQGIHLKNIQSVKVKS | |
| | | PGPHCAQTEVIATLKNGQKACLNPASPMVK | |
| | | KIIEKMLKNGKSNEPKSCDKTHTCPPCPAP | |
| | | ELLGGPSVFLFPPKPKDTLMISRTPEVTCV | |
| | | VVDVSHEDPEVKFNWYVDGVEVHNAKTKPR | |
| | | EEQYGSTYRVVSVLTVLHQDWLNGKEYKCK | |
| | | VSNKALPAPIEKTISKAKGQPREPQVYTLP | |
| | | PSRDELTKNQVSLWCLVKGFYPSDIAVEWE | |
| | | SNGQPENNYKTTPPVLDSDGSFFLYSKLTV | |
| | | DKSRWQQGNVFSCSVMHEALHNHYTQKSLS | |
| | | LSPGKGGSHHHHHH | |
| | Hole: | EVQLVESGGGLVQPGGSLRLSCAASGYTFT | |
| | | NYGMNWVRQAPGKGLEWVGWINTYTGEPTY | |
| | | AADFKRRFTFSLDTSKSTAYLQMNS | |
| | | LRAEDTAVYYCAKYPHYYGSSHWYFDVWGQ | |
| | | GTLVTVSSASTKGPSVFPLAPSSKSTSGGT | |
| | | AALGCLVKDYFPEPVTVSWNSGALTSGVHT | |
| | | FPAVLQSSGLYSLSSVVTVPSSSLGTQTYI | |
| | | CNVNHKPSNTKVDKKVEPKSCDKTHTCPPC | |
| | | PAPELLGGPSVFLFPPKPKDTLMISRTPEV | |
| | | TCVVVDVSHEDPEVKFNWYVDGVEVHNAKT | |
| | | KPREEQYGSTYRVVSVLTVLHQDWLNGKEY | |
| | | KCKVSNKALPAPIEKTISKAKGQPREPQVY | |
| | | TLPPSRDELTKNQVSLSCAVKGFYPSDIAV | |
| | | EWESNGQPENNYKTTPPVLDSDGSFFLVSK | |
| | | LTVDKSRWQQGNVFSCSVMHEALHNHYTQK | |
| | | SLSLSPGKGGSGAWSHPQFEK | |
| | L: | DIQMTQSPSSLSASVGDRVTITCSASQDIS | |
| | | NYLNWYQQKPGKAPKVLIYFTSSLHSGVPS | |
| | | RFSGSGSGTDFTLTISSLQPEDFATYYCQQ | |
| | | YSTVPWTFGQGTKVEIKRTVAAPSVFIFPP | |
| | | SDEQLKSGTASVVCLLNNFYPREAKVQWKV | |
| | | DNALQSGNSQESVTEQDSKDSTYSLSSTLT | |
| | | LSKADYEKHKVYACEVTHQGLSSPVTKSFN | |
| | | RGEC | |
| CXCL3 | Knob: | ASVVTELRCQCLQTLQGIHLKNIQSVNVRS | |
| | | PGPHCAQTEVIATLKNGKKACLNPASPMVQ | |
| | | KIIEKILNKGSTNEPKSCDKTHTCPPCPAP | |
| | | ELLGGPSVFLFPPKPKDTLMISRTPEVTCV | |
| | | VVDVSHEDPEVKFNWYVDGVEVHNAKTKPR | |
| | | EEQYGSTYRVVSVLTVLHQDWLNGKEYKCK | |
| | | VSNKALPAPIEKTISKAKGQPREPQVYTLP | |
| | | PSRDELTKNQVSLWCLVKGFYPSDIAVEWE | |
| | | SNGQPENNYKTTPPVLDSDGSFFLYSKLTV | |
| | | DKSRWQQGNVFSCSVMHEALHNHYTQKSLS | |
| | | LSPGKGGSHHHHHH | |
| | Hole: | EVQLVESGGGLVQPGGSLRLSCAASGYTFT | |
| | | NYGMNWVRQAPGKGLEWVGWINTYTGEPTY | |
| | | AADFKRRFTFSLDTSKSTAYLQMNSLRAED | |
| | | TAVYYCAKYPHYYGSSHWYFDVWGQGTLVT | |
| | | VSSASTKGPSVFPLAPSSKSTSGGTAALGC | |
| | | LVKDYFPEPVTVSWNSGALTSGVHTFPAVL | |
| | | QSSGLYSLSSVVTVPSSSLGTQTYICNVNH | |
| | | KPSNTKVDKKVEPKSCDKTHTCPPCPAPEL | |
| | | LGGPSVFLFPPKPKDTLMISRTPEVTCVVV | |
| | | DVSHEDPEVKFNWYVDGVEVHNAKTKPREE | |
| | | QYGSTYRVVSVLTVLHQDWLNGKEYKCKVS | |
| | | NKALPAPIEKTISKAKGQPREPQVYTLPPS | |
| | | RDELTKNQVSLSCAVKGFYPSDIAVEWESN | |
| | | GQPENNYKTTPPVLDSDGSFFLVSKLTVDK | |
| | | SRWQQGNVFSCSVMHEALHNHYTQKSLSLS | |
| | | PGKGGSGAWSHPQFEK | |
| | L: | DIQMTQSPSSLSASVGDRVTITCSASQDIS | |
| | | NYLNWYQQKPGKAPKVLIYFTSSLHSGVPS | |
| | | RFSGSGSGTDFTLTISSLQPEDFATYYCQQ | |
| | | YSTVPWTFGQGTKVEIKRTVAAPSVFIFPP | |
| | | SDEQLKSGTASVVCLLNNFYPREAKVQWKV | |
| | | DNALQSGNSQESVTEQDSKDSTYSLSSTLT | |
| | | LSKADYEKHKVYACEVTHQGLSSPVTKSFN | |
| | | RGEC | |
| CXCL5 | Knob: | AAVLRELRCVCLQTTQGVHPKMISNLQVFA | |
| | | IGPQCSKVEVVASLKNGKEICLDPEAPFLK | |
| | | KVIQKILDGGNKENEPKSCDKTHTCPPCPA | |
| | | PELLGGPSVFLFPPKPKDTLMISRTPEVTC | |
| | | VVVDVSHEDPEVKFNWYVDGVEVHNAKTKP | |
| | | REEQYGSTYRVVSVLTVLHQDWLNGKEYKC | |
| | | KVSNKALPAPIEKTISKAKGQPREPQVYTL | |
| | | PPSRDELTKNQVSLWCLVKGFYPSDIAVEW | |
| | | ESNGQPENNYKTTPPVLDSDGSFFLYSKLT | |
| | | VDKSRWQQGNVFSCSVMHEALHNHYTQKSL | |
| | | SLSPGKGGSHHHHHH | |
| | Hole: | EVQLVESGGGLVQPGGSLRLSCAASGYTFT | |
| | | NYGMNWVRQAPGKGLEWVGWINTYTGEPTY | |
| | | AADFKRRFTFSLDTSKSTAYLQMNSLRAED | |
| | | TAVYYCAKYPHYYGSSHWYFDVWGQGTLVT | |
| | | VSSASTKGPSVFPLAPSSKSTSGGTAALGC | |
| | | LVKDYFPEPVTVSWNSGALTSGVHTFPAVL | |
| | | QSSGLYSLSSVVTVPSSSLGTQTYICNVNH | |
| | | KPSNTKVDKKVEPKSCDKTHTCPPCPAPEL | |
| | | LGGPSVFLFPPKPKDTLMISRTPEVTCVVV | |
| | | DVSHEDPEVKFNWYVDGVEVHNAKTKPREE | |
| | | QYGSTYRVVSVLTVLHQDWLNGKEYKCKVS | |
| | | NKALPAPIEKTISKAKGQPREPQVYTLPPS | |
| | | RDELTKNQVSLSCAVKGFYPSDIAVEWESN | |
| | | GQPENNYKTTPPVLDSDGSFFLVSKLTVDK | |
| | | SRWQQGNVFSCSVMHEALHNHYTQKSLSLS | |
| | | PGKGGSGAWSHPQFEK | |
| | L: | DIQMTQSPSSLSASVGDRVTITCSASQDIS | |
| | | NYLNWYQQKPGKAPKVLIYFTSSLHSGVPS | |
| | | RFSGSGSGTDFTLTISSLQPEDFATYYCQQ | |
| | | YSTVPWTFGQGTKVEIKRTVAAPSVFIFPP | |
| | | SDEQLKSGTASVVCLLNNFYPREAKVQWKV | |
| | | DNALQSGNSQESVTEQDSKDSTYSLSSTLT | |
| | | LSKADYEKHKVYACEVTHQGLSSPVTKSFN | |
| | | RGEC | |
| CXCL6 | Knob: | VLTELRCTCLRVTLRVNPKTIGKLQVFPAG | |
| | | PQCSKVEVVASLKNGKQVCLDPEAPFLKKV | |
| | | IQKILDSGNKKNEPKSCDKTHTCPPCPAPE | |
| | | LLGGPSVFLFPPKPKDTLMISRTPEVTCVV | |
| | | VDVSHEDPEVKFNWYVDGVEVHNAKTKPRE | |
| | | EQYGSTYRVVSVLTVLHQDWLNGKEYKCKV | |
| | | SNKALPAPIEKTISKAKGQPREPQVYTLPP | |
| | | SRDELTKNQVSLWCLVKGFYPSDIAVEWES | |
| | | NGQPENNYKTTPPVLDSDGSFFLYSKLTVD | |
| | | KSRWQQGNVFSCSVMHEALHNHYTQKSLSL | |
| | | SPGKGGSHHHHHH | |
| | Hole: | EVQLVESGGGLVQPGGSLRLSCAASGYTFT | |
| | | NYGMNWVRQAPGKGLEWVGWINTYTGEPTY | |
| | | AADFKRRFTFSLDTSKSTAYLQMNSLRAED | |
| | | TAVYYCAKYPHYYGSSHWYFDVWGQGTLVT | |
| | | VSSASTKGPSVFPLAPSSKSTSGGTAALGC | |
| | | LVKDYFPEPVTVSWNSGALTSGVHTFPAVL | |
| | | QSSGLYSLSSVVTVPSSSLGTQTYICNVNH | |
| | | KPSNTKVDKKVEPKSCDKTHTCPPCPAPEL | |
| | | LGGPSVFLFPPKPKDTLMISRTPEVTCVVV | |
| | | DVSHEDPEVKFNWYVDGVEVHNAKTKPREE | |
| | | QYGSTYRVVSVLTVLHQDWLNGKEYKCKVS | |
| | | NKALPAPIEKTISKAKGQPREPQVYTLPPS | |
| | | RDELTKNQVSLSCAVKGFYPSDIAVEWESN | |
| | | GQPENNYKTTPPVLDSDGSFFLVSKLTVDK | |
| | | SRWQQGNVFSCSVMHEALHNHYTQKSLSLS | |
| | | PGKGGSGAWSHPQFEK | |
| | L: | DIQMTQSPSSLSASVGDRVTITCSASQDIS | |
| | | NYLNWYQQKPGKAPKVLIYFTSSLHSGVPS | |
| | | RFSGSGSGTDFTLTISSLQPEDFATYYCQQ | |
| | | YSTVPWTFGQGTKVEIKRTVAAPSVFIFPP | |
| | | SDEQLKSGTASVVCLLNNFYPREAKVQWKV | |
| | | DNALQSGNSQESVTEQDSKDSTYSLSSTLT | |
| | | LSKADYEKHKVYACEVTHQGLSSPVTKSFN | |
| | | RGEC | |
| CXCL7 | Knob: | AELRCMCIKTTSGIHPKNIQSLEVIGKGTH | |
| | | CNQVEVIATLKDGRKICLDPDAPRIKKIVQ | |
| | | KKLAGDESADEPKSCDKTHTCPPCPAPELL | |
| | | GGPSVFLFPPKPKDTLMISRTPEVTCVVVD | |
| | | VSHEDPEVKFNWYVDGVEVHNAKTKPREEQ | |
| | | YGSTYRVVSVLTVLHQDWLNGKEYKCKVSN | |
| | | KALPAPIEKTISKAKGQPREPQVYTLPPSR | |
| | | DELTKNQVSLWCLVKGFYPSDIAVEWESNG | |
| | | QPENNYKTTPPVLDSDGSFFL | |
| | | YSKLTVDKSRWQQGNVFSCSVMHEALHNHY | |
| | | TQKSLSLSPGKGGSHHHHHH | |
| | Hole: | EVQLVESGGGLVQPGGSLRLSCAASGYTFT | |
| | | NYGMNWVRQAPGKGLEWVGWINTYTGEPTY | |
| | | AADFKRRFTFSLDTSKSTAYLQMNSLRAED | |
| | | TAVYYCAKYPHYYGSSHWYFDVWGQGTLVT | |
| | | VSSASTKGPSVFPLAPSSKSTSGGTAALGC | |
| | | LVKDYFPEPVTVSWNSGALTSGVHTFPAVL | |
| | | QSSGLYSLSSVVTVPSSSLGTQTYICNVNH | |
| | | KPSNTKVDKKVEPKSCDKTHTCPPCPAPEL | |
| | | LGGPSVFLFPPKPKDTLMISRTPEVTCVVV | |
| | | DVSHEDPEVKFNWYVDGVEVHNAKTKPREE | |
| | | QYGSTYRVVSVLTVLHQDWLNGKEYKCKVS | |
| | | NKALPAPIEKTISKAKGQPREPQVYTLPPS | |
| | | RDELTKNQVSLSCAVKGFYPSDIAVEWESN | |
| | | GQPENNYKTTPPVLDSDGSFFLVSKLTVDK | |
| | | SRWQQGNVFSCSVMHEALHNHYTQKSLSLS | |
| | | PGKGGSGAWSHPQFEK | |
| | L: | DIQMTQSPSSLSASVGDRVTITCSASQDIS | |
| | | NYLNWYQQKPGKAPKVLIYFTSSLHSGVPS | |
| | | RFSGSGSGTDFTLTISSLQPEDFATYYCQQ | |
| | | YSTVPWTFGQGTKVEIKRTVAAPSVFIFPP | |
| | | SDEQLKSGTASVVCLLNNFYPREAKVQWKV | |
| | | DNALQSGNSQESVTEQDSKDSTYSLSSTLT | |
| | | LSKADYEKHKVYACEVTHQGLSSPVTKSFN | |
| | | RGEC | |
| CXCL8 | Knob: | AVLPRSAKELRCQCIKTYSKPFHPKFIKEL | |
| | | RVIESGPHCANTEIIVKLSDGRELCLDPKE | |
| | | NWVQRVVEKFLKRAENSEPKSCDKTHTCPP | |
| | | CPAPELLGGPSVFLFPPKPKDTLMISRTPE | |
| | | VTCVVVDVSHEDPEVKFNWYVDGVEVHNAK | |
| | | TKPREEQYGSTYRVVSVLTVLHQDWLNGKE | |
| | | YKCKVSNKALPAPIEKTISKAKGQPREPQV | |
| | | YTLPPSRDELTKNQVSLWCLVKGFYPSDIA | |
| | | VEWESNGQPENNYKTTPPVLDSDGSFFLYS | |
| | | KLTVDKSRWQQGNVFSCSVMHEALHNHYTQ | |
| | | KSLSLSPGKGGSHHHHHH | |
| | Hole: | EVQLVESGGGLVQPGGSLRLSCAASGYTFT | |
| | | NYGMNWVRQAPGKGLEWVGWINTYTGEPTY | |
| | | AADFKRRFTFSLDTSKSTAYLQMNSLRAED | |
| | | TAVYYCAKYPHYYGSSHWYFDVWGQGTLVT | |
| | | VSSASTKGPSVFPLAPSSKSTSGGTAALGC | |
| | | LVKDYFPEPVTVSWNSGALTSGVHTFPAVL | |
| | | QSSGLYSLSSVVTVPSSSLGTQTYICNVNH | |
| | | KPSNTKVDKKVEPKSCDKTHTCPPCPAPEL | |
| | | LGGPSVFLFPPKPKDTLMISRTPEVTCVVV | |
| | | DVSHEDPEVKFNWYVDGVEVHNAKTKPREE | |
| | | QYGSTYRVVSVLTVLHQDWLNGKEYKCKVS | |
| | | NKALPAPIEKTISKAKGQPREPQVYTLPPS | |
| | | RDELTKNQVSLSCAVKGFYPSDIAVEWESN | |
| | | GQPENNYKTTPPVLDSDGSFFLVSKLTVDK | |
| | | SRWQQGNVFSCSVMHEALHNHYTQKSLSLS | |
| | | PGKGGSGAWSHPQFEK | |
| | L: | DIQMTQSPSSLSASVGDRVTITCSASQDIS | |
| | | NYLNWYQQKPGKAPKVLIYFTSSLHSGVPS | |
| | | RFSGSGSGTDFTLTISSLQPEDFATYYCQQ | |
| | | YSTVPWTFGQGTKVEIKRTVAAPSVFIFPP | |
| | | SDEQLKSGTASVVCLLNNFYPREAKVQWKV | |
| | | DNALQSGNSQESVTEQDSKDSTYSLSSTLT | |
| | | LSKADYEKHKVYACEVTHQGLSSPVTKSFN | |
| | | RGEC | |
| CXCL9 | Knob: | TPVVRKGRCSCISTNQGTIHLQSLKDLKQF | |
| | | APSPSCEKIEIIATLKNGVQTCLNPDSADV | |
| | | KELIKKWEKQVSQKKKQKNGKKHQKKKVLK | |
| | | VRKSQRSRQKKTTEPKSCDKTHTCPPCPAP | |
| | | ELLGGPSVFLFPPKPKDTLMISRTPEVTCV | |
| | | VVDVSHEDPEVKFNWYVDGVEVHN | |
| | | AKTKPREEQYGSTYRVVSVLTVLHQDWLNG | |
| | | KEYKCKVSNKALPAPIEKTISKAKGQPREP | |
| | | QVYTLPPSRDELTKNQVSLWCLVKGFYPSD | |
| | | IAVEWESNGQPENNYKTTPPVLDSDGSFFL | |
| | | YSKLTVDKSRWQQGNVFSCSVMHEALHNHY | |
| | | TQKSLSLSPGKGGSHHHHHH | |
| | Hole: | EVQLVESGGGLVQPGGSLRLSCAASGYTFT | |
| | | NYGMNWVRQAPGKGLEWVGWINTYTGEPTY | |
| | | AADFKRRFTFSLDTSKSTAYLQMNSLRAED | |
| | | TAVYYCAKYPHYYGSSHWYFDVWGQGTLVT | |
| | | VSSASTKGPSVFPLAPSSKSTSGGTAALGC | |
| | | LVKDYFPEPVTVSWNSGALTSGVHTFPAVL | |
| | | QSSGLYSLSSVVTVPSSSLGTQTYICNVNH | |
| | | KPSNTKVDKKVEPKSCDKTHTCPPCPAPEL | |
| | | LGGPSVFLFPPKPKDTLMISRTPEVTCVVV | |
| | | DVSHEDPEVKFNWYVDGVEVHNAKTKPREE | |
| | | QYGSTYRVVSVLTVLHQDWLNGKEYKCKVS | |
| | | NKALPAPIEKTISKAKGQPREPQVYTLPPS | |
| | | RDELTKNQVSLSCAVKGFYPSDIAVEWESN | |
| | | GQPENNYKTTPPVLDSDGSFFLVSKLTVDK | |
| | | SRWQQGNVFSCSVMHEALHNHYTQKSLSLS | |
| | | PGKGGSGAWSHPQFEK | |
| | L: | DIQMTQSPSSLSASVGDRVTITCSASQDIS | |
| | | NYLNWYQQKPGKAPKVLIYFTSSLHSGVPS | |
| | | RFSGSGSGTDFTLTISSLQPEDFATYYCQQ | |
| | | YSTVPWTFGQGTKVEIKRTVAAPSVFIFPP | |
| | | SDEQLKSGTASVVCLLNNFYPREAKVQWKV | |
| | | DNALQSGNSQESVTEQDSKDSTYSLSSTLT | |
| | | LSKADYEKHKVYACEVTHQGLSSPVTKSFN | |
| | | RGEC | |
| CXCL13 | Knob: | VLEVYYTSLRCRCVQESSVFIPRRFIDRIQ | |
| | | ILPRGNGCPRKEIIVWKKNKSIVCVDPQAE | |
| | | WIQRMMEVLRKRSSSTLPVPVFKRKIPEPK | |
| | | SCDKTHTCPPCPAPELLGGPSVFLFPPKPK | |
| | | DTLMISRTPEVTCVVVDVSHEDPEVKFNWY | |
| | | VDGVEVHNAKTKPREEQYGSTYRVVSVLTV | |
| | | LHQDWLNGKEYKCKVSNKALPAPIEKTISK | |
| | | AKGQPREPQVYTLPPSRDELTKNQVSLWCL | |
| | | VKGFYPSDIAVEWESNGQPENNYKTTPPVL | |
| | | DSDGSFFLYSKLTVDKSRWQQGNVFSCSVM | |
| | | HEALHNHYTQKSLSLSPGKGGSHHHHHH | |
| | Hole: | EVQLVESGGGLVQPGGSLRLSCAASGYTFT | |
| | | NYGMNWVRQAPGKGLEWVGWINTYTGEPTY | |
| | | AADFKRRFTFSLDTSKSTAYLQMNSLRAED | |
| | | TAVYYCAKYPHYYGSSHWYFDVWGQGTLVT | |
| | | VSSASTKGPSVFPLAPSSKSTSGGTAALGC | |
| | | LVKDYFPEPVTVSWNSGALTSGVHTFPAVL | |
| | | QSSGLYSLSSVVTVPSSSLGTQTYICNVNH | |
| | | KPSNTKVDKKVEPKSCDKTHTCPPCPAPEL | |
| | | LGGPSVFLFPPKPKDTLMISRTPEVTCVVV | |
| | | DVSHEDPEVKFNWYVDGVEVHNAKTKPREE | |
| | | QYGSTYRVVSVLTVLHQDWLNGKEYKCKVS | |
| | | NKALPAPIEKTISKAKGQPREPQVYTLPPS | |
| | | RDELTKNQVSLSCAVKGFYPSDIAVEWESN | |
| | | GQPENNYKTTPPVLDSDGSFFLVSKLTVDK | |
| | | SRWQQGNVFSCSVMHEALHNHYTQKSLSLS | |
| | | PGKGGSGAWSHPQFEK | |
| | L: | DIQMTQSPSSLSASVGDRVTITCSASQDIS | |
| | | NYLNWYQQKPGKAPKVLIYFTSSLHSGVPS | |
| | | RFSGSGSGTDFTLTISSLQPEDFATYYCQQ | |
| | | YSTVPWTFGQGTKVEIKRTVAAPSVFIFPP | |
| | | SDEQLKSGTASVVCLLNNFYPREAKVQWKV | |
| | | DNALQSGNSQESVTEQDSKDSTYSLSSTLT | |
| | | LSKADYEKHKVYACEVTHQGLSSPVTKSFN | |
| | | RGEC | |
| CXCL16 | Knob: | NEGSVTGSCYCGKRISSDSPPSVQFMNRLR | |
| | | KHLRAYHRCLYYTRFQLLSWSVCGGNKDPW | |
| | | VQELMSCLDLKECGHAYSGIVAHQK | |
| | | HLLPEPKSCDKTHTCPPCPAPELLGGPSVF | |
| | | LFPPKPKDTLMISRTPEVTCVVVDVSHEDP | |
| | | EVKFNWYVDGVEVHNAKTKPREEQYGSTYR | |
| | | VVSVLTVLHQDWLNGKEYKCKVSNKALPAP | |
| | | IEKTISKAKGQPREPQVYTLPPSRDELTKN | |
| | | QVSLWCLVKGFYPSDIAVEWESNGQPENNY | |
| | | KTTPPVLDSDGSFFLYSKLTVDKSRWQQGN | |
| | | VFSCSVMHEALHNHYTQKSLSLSPGKGGSH | |
| | | HHHHH | |
| | Hole: | EVQLVESGGGLVQPGGSLRLSCAASGYTFT | |
| | | NYGMNWVRQAPGKGLEWVGWINTYTGEPTY | |
| | | AADFKRRFTFSLDTSKSTAYLQMNSLRAED | |
| | | TAVYYCAKYPHYYGSSHWYFDVWGQGTLVT | |
| | | VSSASTKGPSVFPLAPSSKSTSGGTAALGC | |
| | | LVKDYFPEPVTVSWNSGALTSGVHTFPAVL | |
| | | QSSGLYSLSSVVTVPSSSLGTQTYICNVNH | |
| | | KPSNTKVDKKVEPKSCDKTHTCPPCPAPEL | |
| | | LGGPSVFLFPPKPKDTLMISRTPEVTCVVV | |
| | | DVSHEDPEVKFNWYVDGVEVHNAKTKPREE | |
| | | QYGSTYRVVSVLTVLHQDWLNGKEYKCKVS | |
| | | NKALPAPIEKTISKAKGQPREPQVYTLPPS | |
| | | RDELTKNQVSLSCAVKGFYPSDIAVEWESN | |
| | | GQPENNYKTTPPVLDSDGSFFLVSKLTVDK | |
| | | SRWQQGNVFSCSVMHEALHNHYTQKSLSLS | |
| | | PGKGGSGAWSHPQFEK | |
| | L: | DIQMTQSPSSLSASVGDRVTITCSASQDIS | |
| | | NYLNWYQQKPGKAPKVLIYFTSSLHSGVPS | |
| | | RFSGSGSGTDFTLTISSLQPEDFATYYCQQ | |
| | | YSTVPWTFGQGTKVEIKRTVAAPSVFIFPP | |
| | | SDEQLKSGTASVVCLLNNFYPREAKVQWKV | |
| | | DNALQSGNSQESVTEQDSKDSTYSLSSTLT | |
| | | LSKADYEKHKVYACEVTHQGLSSPVTKSFN | |
| | | RGEC | |
| CXCL17 | Knob: | SSLNPGVARGHRDRGQASRRWLQEGGQECE | |
| | | CKDWFLRAPRRKFMTVSGLPKKQCPCDHFK | |
| | | GNVKKTRHQRHHRKPNKHSRACQQFLKQCQ | |
| | | LRSFALPLEPKSCDKTHTCPPCPAPELLGG | |
| | | PSVFLFPPKPKDTLMISRTPEVTCVVVDVS | |
| | | HEDPEVKFNWYVDGVEVHNAKTKPREEQYG | |
| | | STYRVVSVLTVLHQDWLNGKEYKCKVSNKA | |
| | | LPAPIEKTISKAKGQPREPQVYTLPPSRDE | |
| | | LTKNQVSLWCLVKGFYPSDIAVEWESNGQP | |
| | | ENNYKTTPPVLDSDGSFFLYSKLTVDKSRW | |
| | | QQGNVFSCSVMHEALHNHYTQKSLSLSPGK | |
| | | GGSHHHHHH | |
| | Hole: | EVQLVESGGGLVQPGGSLRLSCAASGYTFT | |
| | | NYGMNWVRQAPGKGLEWVGWINTYTGEPTY | |
| | | AADFKRRFTFSLDTSKSTAYLQMNSLRAED | |
| | | TAVYYCAKYPHYYGSSHWYFDVWGQGTLVT | |
| | | VSSASTKGPSVFPLAPSSKSTSGGTAALGC | |
| | | LVKDYFPEPVTVSWNSGALTSGVHTFPAVL | |
| | | QSSGLYSLSSVVTVPSSSLGTQTYICNVNH | |
| | | KPSNTKVDKKVEPKSCDKTHTCPPCPAPEL | |
| | | LGGPSVFLFPPKPKDTLMISRTPEVTCVVV | |
| | | DVSHEDPEVKFNWYVDGVEVHNAKTKPREE | |
| | | QYGSTYRVVSVLTVLHQDWLNGKEYKCKVS | |
| | | NKALPAPIEKTISKAKGQPREPQVYTLPPS | |
| | | RDELTKNQVSLSCAVKGFYPSDIAVEWESN | |
| | | GQPENNYKTTPPVLDSDGSFFLVSKLTVDK | |
| | | SRWQQGNVFSCSVMHEALHNHYTQKSLSLS | |
| | | PGKGGSGAWSHPQFEK | |
| | L: | DIQMTQSPSSLSASVGDRVTITCSASQDIS | |
| | | NYLNWYQQKPGKAPKVLIYFTSSLHSGVPS | |
| | | RFSGSGSGTDFTLTISSLQPEDFATYYCQQ | |
| | | YSTVPWTFGQGTKVEIKRTVAAPSVFIFPP | |
| | | SDEQLKSGTASVVCLLNNFYPREAKVQWKV | |
| | | DNALQSGNSQESVTEQDSKDSTYSLSSTLT | |
| | | LSKADYEKHKVYACEVTHQGLSSPVTKSFN | |
| | | RGEC | |
| CCL1 | Knob: | SKSMQVPFSRCCFSFAEQEIPLRAILCYRN | |
| | | TSSICSNEGLIFKLKRGKEACALDTVGWVQ | |
| | | RHRKMLRHCPSKRKEPKSCDKTHTCPPCPA | |
| | | PELLGGPSVFLFPPKPKDTLMISRTPEVTC | |
| | | VVVDVSHEDPEVKFNWYVDGVEVHNAKTKP | |
| | | REEQYGSTYRVVSVLTVLHQDWLNGKEYKC | |
| | | KVSNKALPAPIEKTISKAKGQPREPQVYTL | |
| | | PPSRDELTKNQVSLWCLVKGFYPSDIAVEW | |
| | | ESNGQPENNYKTTPPVLDSDGSFFLYSKLT | |
| | | VDKSRWQQGNVFSCSVMHEALHNHYTQKSL | |
| | | SLSPGKGGSHHHHHH | |
| | Hole: | EVQLVESGGGLVQPGGSLRLSCAASGYTFT | |
| | | NYGMNWVRQAPGKGLEWVGWINTYTGEPTY | |
| | | AADFKRRFTFSLDTSKSTAYLQMNSLRAED | |
| | | TAVYYCAKYPHYYGSSHWYFDVWGQGTLVT | |
| | | VSSASTKGPSVFPLAPSSKSTSGGTAALGC | |
| | | LVKDYFPEPVTVSWNSGALTSGVHTFPAVL | |
| | | QSSGLYSLSSVVTVPSSSLGTQTYICNVNH | |
| | | KPSNTKVDKKVEPKSCDKTHTCPPCPAPEL | |
| | | LGGPSVFLFPPKPKDTLMISRTPEVTCVVV | |
| | | DVSHEDPEVKFNWYVDGVEVHNAKTKPREE | |
| | | QYGSTYRVVSVLTVLHQDWLNGKEYKCKVS | |
| | | NKALPAPIEKTISKAKGQPREPQVYTLPPS | |
| | | RDELTKNQVSLSCAVKGFYPSDIAVEWESN | |
| | | GQPENNYKTTPPVLDSDGSFFLVSKLTVDK | |
| | | SRWQQGNVFSCSVMHEALHNHYTQKSLSLS | |
| | | PGKGGSGAWSHPQFEK | |
| | L: | DIQMTQSPSSLSASVGDRVTITCSASQDIS | |
| | | NYLNWYQQKPGKAPKVLIYFTSSLHSGVPS | |
| | | RFSGSGSGTDFTLTISSLQPEDFATYYCQQ | |
| | | YSTVPWTFGQGTKVEIKRTVAAPSVFIFPP | |
| | | SDEQLKSGTASVVCLLNNFYPREAKVQWKV | |
| | | DNALQSGNSQESVTEQDSKDSTYSLSSTLT | |
| | | LSKADYEKHKVYACEVTHQGLSSPVTKSFN | |
| | | RGEC | |
| CCL2 | Knob: | QPDAINAPVTCCYNFTNRKISVQRLASYRR | |
| | | ITSSKCPKEAVIFKTIVAKEICADPKQKWV | |
| | | QDSMDHLDKQTQTPKTEPKSCDKTHTCPPC | |
| | | PAPELLGGPSVFLFPPKPKDTLMISRTPEV | |
| | | TCVVVDVSHEDPEVKFNWYVDGVEVHNAKT | |
| | | KPREEQYGSTYRVVSVLTVLHQDWLNGKEY | |
| | | KCKVSNKALPAPIEKTISKAKGQPREPQVY | |
| | | TLPPSRDELTKNQVSLWCLVKGFYPSDIAV | |
| | | EWESNGQPENNYKTTPPVLDSDGSFFLYSK | |
| | | LTVDKSRWQQGNVFSCSVMHEALHNHYTQK | |
| | | SLSLSPGKGGSHHHHHH | |
| | Hole: | EVQLVESGGGLVQPGGSLRLSCAASGYTFT | |
| | | NYGMNWVRQAPGKGLEWVGWINTYTGEPTY | |
| | | AADFKRRFTFSLDTSKSTAYLQMNSLRAED | |
| | | TAVYYCAKYPHYYGSSHWYFDVWGQGTLVT | |
| | | VSSASTKGPSVFPLAPSSKSTSGGTAALGC | |
| | | LVKDYFPEPVTVSWNSGALTSGVHTFPAVL | |
| | | QSSGLYSLSSVVTVPSSSLGTQTYICNVNH | |
| | | KPSNTKVDKKVEPKSCDKTHTCPPCPAPEL | |
| | | LGGPSVFLFPPKPKDTLMISRTPEVTCVVV | |
| | | DVSHEDPEVKFNWYVDGVEVHNAKTKPREE | |
| | | QYGSTYRVVSVLTVLHQDWLNGKEYKCKVS | |
| | | NKALPAPIEKTISKAKGQPREPQVYTLPPS | |
| | | RDELTKNQVSLSCAVKGFYPSDIAVEWESN | |
| | | GQPENNYKTTPPVLDSDGSFFLVSKLTVDK | |
| | | SRWQQGNVFSCSVMHEALHNHYTQKSLSLS | |
| | | PGKGGSGAWSHPQFEK | |
| | L: | DIQMTQSPSSLSASVGDRVTITCSASQDIS | |
| | | NYLNWYQQKPGKAPKVLIYFTSSLHSGVPS | |
| | | RESGSGSGTDFTLTISSLQPEDFATYYCQQ | |
| | | YSTVPWTFGQGTKVEIKRTVAAPSVFIFPP | |
| | | SDEQLKSGTASVVC | |
| | | LLNNFYPREAKVQWKVDNALQSGNSQESVT | |
| | | EQDSKDSTYSLSSTLTLSKADYEKHKVYAC | |
| | | EVTHQGLSSPVTKSFNRGEC | |
| CCL3 | Knob: | ASLAADTPTACCFSYTSRQIPQNFIADYFE | |
| | | TSSQCSKPGVIFLTKRSRQVCADPSEEWVQ | |
| | | KYVSDLELSAEPKSCDKTHTCPPCPAPELL | |
| | | GGPSVFLFPPKPKDTLMISRTPEVTCVVVD | |
| | | VSHEDPEVKENWYVDGVEVHNAKTKPREEQ | |
| | | YGSTYRVVSVLTVLHQDWLNGKEYKCKVSN | |
| | | KALPAPIEKTISKAKGQPREPQVYTLPPSR | |
| | | DELTKNQVSLWCLVKGFYPSDIAVEWESNG | |
| | | QPENNYKTTPPVLDSDGSFFLYSKLTVDKS | |
| | | RWQQGNVFSCSVMHEALHNHYTQKSLSLSP | |
| | | GKGGSHHHHHH | |
| | Hole: | EVQLVESGGGLVQPGGSLRLSCAASGYTFT | |
| | | NYGMNWVRQAPGKGLEWVGWINTYTGEPTY | |
| | | AADFKRRFTFSLDTSKSTAYLQMNSLRAED | |
| | | TAVYYCAKYPHYYGSSHWYFDVWGQGTLVT | |
| | | VSSASTKGPSVFPLAPSSKSTSGGTAALGC | |
| | | LVKDYFPEPVTVSWNSGALTSGVHTFPAVL | |
| | | QSSGLYSLSSVVTVPSSSLGTQTYICNVNH | |
| | | KPSNTKVDKKVEPKSCDKTHTCPPCPAPEL | |
| | | LGGPSVFLFPPKPKDTLMISRTPEVTCVVV | |
| | | DVSHEDPEVKFNWYVDGVEVHNAKTKPREE | |
| | | QYGSTYRVVSVLTVLHQDWLNGKEYKCKVS | |
| | | NKALPAPIEKTISKAKGQPREPQVYTLPPS | |
| | | RDELTKNQVSLSCAVKGFYPSDIAVEWESN | |
| | | GQPENNYKTTPPVLDSDGSFFLVSKLTVDK | |
| | | SRWQQGNVFSCSVMHEALHNHYTQKSLSLS | |
| | | PGKGGSGAWSHPQFEK | |
| | L: | DIQMTQSPSSLSASVGDRVTITCSASQDIS | |
| | | NYLNWYQQKPGKAPKVLIYFTSSLHSGVPS | |
| | | RFSGSGSGTDFTLTISSLQPEDFATYYCQQ | |
| | | YSTVPWTFGQGTKVEIKRTVAAPSVFIFPP | |
| | | SDEQLKSGTASVVCLLNNFYPREAKVQWKV | |
| | | DNALQSGNSQESVTEQDSKDSTYSLSSTLT | |
| | | LSKADYEKHKVYACEVTHQGLSSPVTKSFN | |
| | | RGEC | |
| CCL3L1 | Knob: | APLAADTPTACCFSYTSRQIPQNFIADYFE | |
| | | TSSQCSKPSVIFLTKRGRQVCADPSEEWVQ | |
| | | KYVSDLELSAEPKSCDKTHTCPPCPAPELL | |
| | | GGPSVFLFPPKPKDTLMISRTPEVTCVVVD | |
| | | VSHEDPEVKFNWYVDGVEVHNAKTKPREEQ | |
| | | YGSTYRVVSVLTVLHQDWLNGKEYKCKVSN | |
| | | KALPAPIEKTISKAKGQPREPQVYTLPPSR | |
| | | DELTKNQVSLWCLVKGFYPSDIAVEWESNG | |
| | | QPENNYKTTPPVLDSDGSFFLYSKLTVDKS | |
| | | RWQQGNVFSCSVMHEALHNHYTQKSLSLSP | |
| | | GKGGSHHHHHH | |
| | Hole: | EVQLVESGGGLVQPGGSLRLSCAASGYTFT | |
| | | NYGMNWVRQAPGKGLEWVGWINTYTGEPTY | |
| | | AADFKRRFTFSLDTSKSTAYLQMNSLRAED | |
| | | TAVYYCAKYPHYYGSSHWYFDVWGQGTLVT | |
| | | VSSASTKGPSVFPLAPSSKSTSGGTAALGC | |
| | | LVKDYFPEPVTVSWNSGALTSGVHTFPAVL | |
| | | QSSGLYSLSSVVTVPSSSLGTQTYICNVNH | |
| | | KPSNTKVDKKVEPKSCDKTHTCPPCPAPEL | |
| | | LGGPSVFLFPPKPKDTLMISRTPEVTCVVV | |
| | | DVSHEDPEVKFNWYVDGVEVHNAKTKPREE | |
| | | QYGSTYRVVSVLTVLHQDWLNGKEYKCKVS | |
| | | NKALPAPIEKTISKAKGQPREPQVYTLPPS | |
| | | RDELTKNQVSLSCAVKGFYPSDIAVEWESN | |
| | | GQPENNYKTTPPVLDSDGSFFLVSKLTVDK | |
| | | SRWQQGNVFSCSVMHEALHNHYTQKSLSLS | |
| | | PGKGGSGAWSHPQFEK | |
| | L: | DIQMTQSPSSLSASVGDRVTITCSASQDIS | |
| | | NYLNWYQQKPGKAPKVLIYFTSSLHSGVPS | |
| | | RFSGSGSGTDFTLTISSLQPEDFATYYCQQ | |
| | | YSTVPWTFGQGTKVEIKRTVAAPSVFIFPP | |
| | | SDEQLKSGTASVVCLLNNFYPREAKVQWKV | |
| | | DNALQSGNSQESVTEQDSKDSTYSLSSTLT | |
| | | LSKADYEKHKVYACEVTHQGLSSPVTKSFN | |
| | | RGEC | |
| CCL4 | Knob: | APMGSDPPTACCFSYTARKLPRNFVVDYYE | |
| | | TSSLCSQPAVVFQTKRSKQVCADPSESWVQ | |
| | | EYVYDLELNEPKSCDKTHTCPPCPAPELLG | |
| | | GPSVFLFPPKPKDTLMISRTPEVTCVVVDV | |
| | | SHEDPEVKFNWYVDGVEVHNAKTKPREEQY | |
| | | GSTYRVVSVLTVLHQDWLNGKEYKCKVSNK | |
| | | ALPAPIEKTISKAKGQPREPQVYTLPPSRD | |
| | | ELTKNQVSLWCLVKGFYPSDIAVEWESNGQ | |
| | | PENNYKTTPPVLDSDGSFFLYSKLTVDKSR | |
| | | WQQGNVFSCSVMHEALHNHYTQKSLSLSPG | |
| | | KGGSHHHHHH | |
| | Hole: | EVQLVESGGGLVQPGGSLRLSCAASGYTFT | |
| | | NYGMNWVRQAPGKGLEWVGWINTYTGEPTY | |
| | | AADFKRRFTFSLDTSKSTAYLQMNSLRAED | |
| | | TAVYYCAKYPHYYGSSHWYFDVWGQGTLVT | |
| | | VSSASTKGPSVFPLAPSSKSTSGGTAALGC | |
| | | LVKDYFPEPVTVSWNSGALTSGVHTFPAVL | |
| | | QSSGLYSLSSVVTVPSSSLGTQTYICNVNH | |
| | | KPSNTKVDKKVEPKSCDKTHTCPPCPAPEL | |
| | | LGGPSVFLFPPKPKDTLMISRTPEVTCVVV | |
| | | DVSHEDPEVKFNWYVDGVEVHNAKTKPREE | |
| | | QYGSTYRVVSVLTVLHQDWLNGKEYKCKVS | |
| | | NKALPAPIEKTISKAKGQPREPQVYTLPPS | |
| | | RDELTKNQVSLSCAVKGFYPSDIAVEWESN | |
| | | GQPENNYKTTPPVLDSDGSFFLVSKLTVDK | |
| | | SRWQQGNVFSCSVMHEALHNHYTQKSLSLS | |
| | | PGKGGSGAWSHPQFEK | |
| | L: | DIQMTQSPSSLSASVGDRVTITCSASQDIS | |
| | | NYLNWYQQKPGKAPKVLIYFTSSLHSGVPS | |
| | | RFSGSGSGTDFTLTISSLQPEDFATYYCQQ | |
| | | YSTVPWTFGQGTKVEIKRTVAAPSVFIFPP | |
| | | SDEQLKSGTASVVCLLNNFYPREAKVQWKV | |
| | | DNALQSGNSQESVTEQDSKDSTYSLSSTLT | |
| | | LSKADYEKHKVYACEVTHQGLSSPVTKSFN | |
| | | RGEC | |
| CC4L1 | Knob: | APMGSDPPTACCFSYTARKLPRNFVVDYYE | |
| | | TSSLCSQPAVVFQTKRGKQVCADPSESWVQ | |
| | | EYVYDLELNEPKSCDKTHTCPPCPAPELLG | |
| | | GPSVFLFPPKPKDTLMISRTPEVTCVVVDV | |
| | | SHEDPEVKFNWYVDGVEVHNAKTKPREEQY | |
| | | GSTYRVVSVLTVLHQDWLNGKEYKCKVSNK | |
| | | ALPAPIEKTISKAKGQPREPQVYTLPPSRD | |
| | | ELTKNQVSLWCLVKGFYPSDIAVEWESNGQ | |
| | | PENNYKTTPPVLDSDGSFFLYSKLTVDKSR | |
| | | WQQGNVFSCSVMHEALHNHYTQKSLSLSPG | |
| | | KGGSHHHHHH | |
| | Hole: | EVQLVESGGGLVQPGGSLRLSCAASGYTFT | |
| | | NYGMNWVRQAPGKGLEWVGWINTYTGEPTY | |
| | | AADFKRRFTFSLDTSKSTAYLQMNSLRAED | |
| | | TAVYYCAKYPHYYGSSHWYFDVWGQGTLVT | |
| | | VSSASTKGPSVFPLAPSSKSTSGGTAALGC | |
| | | LVKDYFPEPVTVSWNSGALTSGVHTFPAVL | |
| | | QSSGLYSLSSVVTVPSSSLGTQTYICNVNH | |
| | | KPSNTKVDKKVEPKSCDKTHTCPPCPAPEL | |
| | | LGGPSVFLFPPKPKDTLMISRTPEVTCVVV | |
| | | DVSHEDPEVKFNWYVDGVEVHNAKTKPREE | |
| | | QYGSTYRVVSVLTVLHQDWLNGKEYKCKVS | |
| | | NKALPAPIEKTISKAKGQPREPQVYTLPPS | |
| | | RDELTKNQVSLSCAVKGFYPSDIAVEW | |
| | | ESNGQPENNYKTTPPVLDSDGSFFLVSKLT | |
| | | VDKSRWQQGNVFSCSVMHEALHNHYTQKSL | |
| | | SLSPGKGGSGAWSHPQFEK | |
| | L: | DIQMTQSPSSLSASVGDRVTITCSASQDIS | |
| | | NYLNWYQQKPGKAPKVLIYFTSSLHSGVPS | |
| | | RFSGSGSGTDFTLTISSLQPEDFATYYCQQ | |
| | | YSTVPWTFGQGTKVEIKRTVAAPSVFIFPP | |
| | | SDEQLKSGTASVVCLLNNFYPREAKVQWKV | |
| | | DNALQSGNSQESVTEQDSKDSTYSLSSTLT | |
| | | LSKADYEKHKVYACEVTHQGLSSPVTKSFN | |
| | | RGEC | |
| CCL5 | Knob: | SPYSSDTTPCCFAYIARPLPRAHIKEYFYT | |
| | | SGKCSNPAVVFVTRKNRQVCANPEKKWVRE | |
| | | YINSLEMSEPKSCDKTHTCPPCPAPELLGG | |
| | | PSVFLFPPKPKDTLMISRTPEVTCVVVDVS | |
| | | HEDPEVKENWYVDGVEVHNAKTKPREEQYG | |
| | | STYRVVSVLTVLHQDWLNGKEYKCKVSNKA | |
| | | LPAPIEKTISKAKGQPREPQVYTLPPSRDE | |
| | | LTKNQVSLWCLVKGFYPSDIAVEWESNGQP | |
| | | ENNYKTTPPVLDSDGSFFLYSKLTVDKSRW | |
| | | QQGNVFSCSVMHEALHNHYTQKSLSLSPGK | |
| | | GGSHHHHHH | |
| | Hole: | EVQLVESGGGLVQPGGSLRLSCAASGYTFT | |
| | | NYGMNWVRQAPGKGLEWVGWINTYTGEPTY | |
| | | AADFKRRFTFSLDTSKSTAYLQMNSLRAED | |
| | | TAVYYCAKYPHYYGSSHWYFDVWGQGTLVT | |
| | | VSSASTKGPSVFPLAPSSKSTSGGTAALGC | |
| | | LVKDYFPEPVTVSWNSGALTSGVHTFPAVL | |
| | | QSSGLYSLSSVVTVPSSSLGTQTYICNVNH | |
| | | KPSNTKVDKKVEPKSCDKTHTCPPCPAPEL | |
| | | LGGPSVFLFPPKPKDTLMISRTPEVTCVVV | |
| | | DVSHEDPEVKFNWYVDGVEVHNAKTKPREE | |
| | | QYGSTYRVVSVLTVLHQDWLNGKEYKCKVS | |
| | | NKALPAPIEKTISKAKGQPREPQVYTLPPS | |
| | | RDELTKNQVSLSCAVKGFYPSDIAVEWESN | |
| | | GQPENNYKTTPPVLDSDGSFFLVSKLTVDK | |
| | | SRWQQGNVFSCSVMHEALHNHYTQKSLSLS | |
| | | PGKGGSGAWSHPQFEK | |
| | L: | DIQMTQSPSSLSASVGDRVTITCSASQDIS | |
| | | NYLNWYQQKPGKAPKVLIYFTSSLHSGVPS | |
| | | RFSGSGSGTDFTLTISSLQPEDFATYYCQQ | |
| | | YSTVPWTFGQGTKVEIKRTVAAPSVFIFPP | |
| | | SDEQLKSGTASVVCLLNNFYPREAKVQWKV | |
| | | DNALQSGNSQESVTEQDSKDSTYSLSSTLT | |
| | | LSKADYEKHKVYACEVTHQGLSSPVTKSFN | |
| | | RGEC | |
| CCL7 | Knob: | QPVGINTSTTCCYRFINKKIPKQRLESYRR | |
| | | TTSSHCPREAVIFKTKLDKEICADPTQKWV | |
| | | QDFMKHLDKKTQTPKLEPKSCDKTHTCPPC | |
| | | PAPELLGGPSVFLFPPKPKDTLMISRTPEV | |
| | | TCVVVDVSHEDPEVKFNWYVDGVEVHNAKT | |
| | | KPREEQYGSTYRVVSVLTVLHQDWLNGKEY | |
| | | KCKVSNKALPAPIEKTISKAKGQPREPQVY | |
| | | TLPPSRDELTKNQVSLWCLVKGFYPSDIAV | |
| | | EWESNGQPENNYKTTPPVLDSDGSFFLYSK | |
| | | LTVDKSRWQQGNVFSCSVMHEALHNHYTQK | |
| | | SLSLSPGKGGSHHHHHH | |
| | Hole: | EVQLVESGGGLVQPGGSLRLSCAASGYTFT | |
| | | NYGMNWVRQAPGKGLEWVGWINTYTGEPTY | |
| | | AADFKRRFTFSLDTSKSTAYLQMNSLRAED | |
| | | TAVYYCAKYPHYYGSSHWYFDVWGQGTLVT | |
| | | VSSASTKGPSVFPLAPSSKSTSGGTAALGC | |
| | | LVKDYFPEPVTVSWNSGALTSGVHTFPAVL | |
| | | QSSGLYSLSSVVTVPSSSLGTQTYICNVNH | |
| | | KPSNTKVDKKVEPKSCDKTHTCPPCPAPEL | |
| | | LGGPSVFLFPPKPKDTLMISRTPEVTCVVV | |
| | | DVSHEDPEVKFNWYVDGVEVHNAKTKPREE | |
| | | Q | |
| | | YGSTYRVVSVLTVLHQDWLNGKEYKCKVSN | |
| | | KALPAPIEKTISKAKGQPREPQVYTLPPSR | |
| | | DELTKNQVSLSCAVKGFYPSDIAVEWESNG | |
| | | QPENNYKTTPPVLDSDGSFFLVSKLTVDKS | |
| | | RWQQGNVFSCSVMHEALHNHYTQKSLSLSP | |
| | | GKGGSGAWSHPQFEK | |
| | L: | DIQMTQSPSSLSASVGDRVTITCSASQDIS | |
| | | NYLNWYQQKPGKAPKVLIYFTSSLHSGVPS | |
| | | RFSGSGSGTDFTLTISSLQPEDFATYYCQQ | |
| | | YSTVPWTFGQGTKVEIKRTVAAPSVFIFPP | |
| | | SDEQLKSGTASVVCLLNNFYPREAKVQWKV | |
| | | DNALQSGNSQESVTEQDSKDSTYSLSSTLT | |
| | | LSKADYEKHKVYACEVTHQGLSSPVTKSFN | |
| | | RGEC | |
| CCL8 | Knob: | QPDSVSIPITCCFNVINRKIPIQRLESYTR | |
| | | ITNIQCPKEAVIFKTKRGKEVCADPKERWV | |
| | | RDSMKHLDQIFQNLKPEPKSCDKTHTCPPC | |
| | | PAPELLGGPSVFLFPPKPKDTLMISRTPEV | |
| | | TCVVVDVSHEDPEVKFNWYVDGVEVHNAKT | |
| | | KPREEQYGSTYRVVSVLTVLHQDWLNGKEY | |
| | | KCKVSNKALPAPIEKTISKAKGQPREPQVY | |
| | | TLPPSRDELTKNQVSLWCLVKGFYPSDIAV | |
| | | EWESNGQPENNYKTTPPVLDSDGSFFLYSK | |
| | | LTVDKSRWQQGNVFSCSVMHEALHNHYTQK | |
| | | SLSLSPGKGGSHHHHHH | |
| | Hole: | EVQLVESGGGLVQPGGSLRLSCAASGYTFT | |
| | | NYGMNWVRQAPGKGLEWVGWINTYTGEPTY | |
| | | AADFKRRFTFSLDTSKSTAYLQMNSLRAED | |
| | | TAVYYCAKYPHYYGSSHWYFDVWGQGTLVT | |
| | | VSSASTKGPSVFPLAPSSKSTSGGTAALGC | |
| | | LVKDYFPEPVTVSWNSGALTSGVHTFPAVL | |
| | | QSSGLYSLSSVVTVPSSSLGTQTYICNVNH | |
| | | KPSNTKVDKKVEPKSCDKTHTCPPCPAPEL | |
| | | LGGPSVFLFPPKPKDTLMISRTPEVTCVVV | |
| | | DVSHEDPEVKFNWYVDGVEVHNAKTKPREE | |
| | | QYGSTYRVVSVLTVLHQDWLNGKEYKCKVS | |
| | | NKALPAPIEKTISKAKGQPREPQVYTLPPS | |
| | | RDELTKNQVSLSCAVKGFYPSDIAVEWESN | |
| | | GQPENNYKTTPPVLDSDGSFFLVSKLTVDK | |
| | | SRWQQGNVFSCSVMHEALHNHYTQKSLSLS | |
| | | PGKGGSGAWSHPQFEK | |
| | L: | DIQMTQSPSSLSASVGDRVTITCSASQDIS | |
| | | NYLNWYQQKPGKAPKVLIYFTSSLHSGVPS | |
| | | RFSGSGSGTDFTLTISSLQPEDFATYYCQQ | |
| | | YSTVPWTFGQGTKVEIKRTVAAPSVFIFPP | |
| | | SDEQLKSGTASVVCLLNNFYPREAKVQWKV | |
| | | DNALQSGNSQESVTEQDSKDSTYSLSSTLT | |
| | | LSKADYEKHKVYACEVTHQGLSSPVTKSFN | |
| | | RGEC | |
| CCL11 | Knob: | GPASVPTTCCFNLANRKIPLQRLESYRRIT | |
| | | SGKCPQKAVIFKTKLAKDICADPKKKWVQD | |
| | | SMKYLDQKSPTPKPEPKSCDKTHTCPPCPA | |
| | | PELLGGPSVFLFPPKPKDTLMISRTPEVTC | |
| | | VVVDVSHEDPEVKFNWYVDGVEVHNAKTKP | |
| | | REEQYGSTYRVVSVLTVLHQDWLNGKEYKC | |
| | | KVSNKALPAPIEKTISKAKGQPREPQVYTL | |
| | | PPSRDELTKNQVSLWCLVKGFYPSDIAVEW | |
| | | ESNGQPENNYKTTPPVLDSDGSFFLYSKLT | |
| | | VDKSRWQQGNVFSCSVMHEALHNHYTQKSL | |
| | | SLSPGKGGSHHHHHH | |
| | Hole: | EVQLVESGGGLVQPGGSLRLSCAASGYTFT | |
| | | NYGMNWVRQAPGKGLEWVGWINTYTGEPTY | |
| | | AADFKRRFTFSLDTSKSTAYLQMNSLRAED | |
| | | TAVYYCAKYPHYYGSSHWYFDVWGQGTLVT | |
| | | VSSASTKGPSVFPLAPSSKSTSGGTAALGC | |
| | | LVKDYFPEPVTVSWNSGALTSGVHTFPAVL | |
| | | QSSGLYSLSSVVTVPSSSLGTQTYICNVNH | |
| | | KPSNT | |
| | | KVDKKVEPKSCDKTHTCPPCPAPELLGGPS | |
| | | VFLFPPKPKDTLMISRTPEVTCVVVDVSHE | |
| | | DPEVKFNWYVDGVEVHNAKTKPREEQYGST | |
| | | YRVVSVLTVLHQDWLNGKEYKCKVSNKALP | |
| | | APIEKTISKAKGQPREPQVYTLPPSRDELT | |
| | | KNQVSLSCAVKGFYPSDIAVEWESNGQPEN | |
| | | NYKTTPPVLDSDGSFFLVSKLTVDKSRWQQ | |
| | | GNVFSCSVMHEALHNHYTQKSLSLSPGKGG | |
| | | SGAWSHPQFEK | |
| | L: | DIQMTQSPSSLSASVGDRVTITCSASQDIS | |
| | | NYLNWYQQKPGKAPKVLIYFTSSLHSGVPS | |
| | | RFSGSGSGTDFTLTISSLQPEDFATYYCQQ | |
| | | YSTVPWTFGQGTKVEIKRTVAAPSVFIFPP | |
| | | SDEQLKSGTASVVCLLNNFYPREAKVQWKV | |
| | | DNALQSGNSQESVTEQDSKDSTYSLSSTLT | |
| | | LSKADYEKHKVYACEVTHQGLSSPVTKSFN | |
| | | RGEC | |
| CCL13 | Knob: | QPDALNVPSTCCFTFSSKKISLQRLKSYVI | |
| | | TTSRCPQKAVIFRTKLGKEICADPKEKWVQ | |
| | | NYMKHLGRKAHTLKTEPKSCDKTHTCPPCP | |
| | | APELLGGPSVFLFPPKPKDTLMISRTPEVT | |
| | | CVVVDVSHEDPEVKFNWYVDGVEVHNAKTK | |
| | | PREEQYGSTYRVVSVLTVLHQDWLNGKEYK | |
| | | CKVSNKALPAPIEKTISKAKGQPREPQVYT | |
| | | LPPSRDELTKNQVSLWCLVKGFYPSDIAVE | |
| | | WESNGQPENNYKTTPPVLDSDGSFFLYSKL | |
| | | TVDKSRWQQGNVFSCSVMHEALHNHYTQKS | |
| | | LSLSPGKGGSHHHHHH | |
| | Hole: | EVQLVESGGGLVQPGGSLRLSCAASGYTFT | |
| | | NYGMNWVRQAPGKGLEWVGWINTYTGEPTY | |
| | | AADFKRRFTFSLDTSKSTAYLQMNSLRAED | |
| | | TAVYYCAKYPHYYGSSHWYFDVWGQGTLVT | |
| | | VSSASTKGPSVFPLAPSSKSTSGGTAALGC | |
| | | LVKDYFPEPVTVSWNSGALTSGVHTFPAVL | |
| | | QSSGLYSLSSVVTVPSSSLGTQTYICNVNH | |
| | | KPSNTKVDKKVEPKSCDKTHTCPPCPAPEL | |
| | | LGGPSVFLFPPKPKDTLMISRTPEVTCVVV | |
| | | DVSHEDPEVKFNWYVDGVEVHNAKTKPREE | |
| | | QYGSTYRVVSVLTVLHQDWLNGKEYKCKVS | |
| | | NKALPAPIEKTISKAKGQPREPQVYTLPPS | |
| | | RDELTKNQVSLSCAVKGFYPSDIAVEWESN | |
| | | GQPENNYKTTPPVLDSDGSFFLVSKLTVDK | |
| | | SRWQQGNVFSCSVMHEALHNHYTQKSLSLS | |
| | | PGKGGSGAWSHPQFEK | |
| | L: | DIQMTQSPSSLSASVGDRVTITCSASQDIS | |
| | | NYLNWYQQKPGKAPKVLIYFTSSLHSGVPS | |
| | | RFSGSGSGTDFTLTISSLQPEDFATYYCQQ | |
| | | YSTVPWTFGQGTKVEIKRTVAAPSVFIFPP | |
| | | SDEQLKSGTASVVCLLNNFYPREAKVQWKV | |
| | | DNALQSGNSQESVTEQDSKDSTYSLSSTLT | |
| | | LSKADYEKHKVYACEVTHQGLSSPVTKSFN | |
| | | RGEC | |
| CCL14 | Knob: | TESSSRGPYHPSECCFTYTTYKIPRQRIMD | |
| | | YYETNSQCSKPGIVFITKRGHSVCTNPSDK | |
| | | WVQDYIKDMKENEPKSCDKTHTCPPCPAPE | |
| | | LLGGPSVFLFPPKPKDTLMISRTPEVTCVV | |
| | | VDVSHEDPEVKFNWYVDGVEVHNAKTKPRE | |
| | | EQYGSTYRVVSVLTVLHQDWLNGKEYKCKV | |
| | | SNKALPAPIEKTISKAKGQPREPQVYTLPP | |
| | | SRDELTKNQVSLWCLVKGFYPSDIAVEWES | |
| | | NGQPENNYKTTPPVLDSDGSFFLYSKLTVD | |
| | | KSRWQQGNVFSCSVMHEALHNHYTQKSLSL | |
| | | SPGKGGSHHHHHH | |
| | Hole: | EVQLVESGGGLVQPGGSLRLSCAASGYTFT | |
| | | NYGMNWVRQAPGKGLEWVGWINTYTGEPTY | |
| | | AADFKRRFTFSLDTSKSTAYLQMNSLRAED | |
| | | TAVYYCAKYPHYYGSSHWYFDVWGQGTLVT | |
| | | VSSASTK | |
| | | GPSVFPLAPSSKSTSGGTAALGCLVKDYFP | |
| | | EPVTVSWNSGALTSGVHTFPAVLQSSGLYS | |
| | | LSSVVTVPSSSLGTQTYICNVNHKPSNTKV | |
| | | DKKVEPKSCDKTHTCPPCPAPELLGGPSVF | |
| | | LFPPKPKDTLMISRTPEVTCVVVDVSHEDP | |
| | | EVKFNWYVDGVEVHNAKTKPREEQYGSTYR | |
| | | VVSVLTVLHQDWLNGKEYKCKVSNKALPAP | |
| | | IEKTISKAKGQPREPQVYTLPPSRDELTKN | |
| | | QVSLSCAVKGFYPSDIAVEWESNGQPENNY | |
| | | KTTPPVLDSDGSFFLVSKLTVDKSRWQQGN | |
| | | VFSCSVMHEALHNHYTQKSLSLSPGKGGSG | |
| | | AWSHPQFEK | |
| | L: | DIQMTQSPSSLSASVGDRVTITCSASQDIS | |
| | | NYLNWYQQKPGKAPKVLIYFTSSLHSGVPS | |
| | | RFSGSGSGTDFTLTISSLQPEDFATYYCQQ | |
| | | YSTVPWTFGQGTKVEIKRTVAAPSVFIFPP | |
| | | SDEQLKSGTASVVCLLNNFYPREAKVQWKV | |
| | | DNALQSGNSQESVTEQDSKDSTYSLSSTLT | |
| | | LSKADYEKHKVYACEVTHQGLSSPVTKSFN | |
| | | RGEC | |
| CCL15 | Knob: | QFINDAETELMMSKLPLENPVVLNSFHFAA | |
| | | DCCTSYISQSIPCSLMKSYFETSSECSKPG | |
| | | VIFLTKKGRQVCAKPSGPGVQDCMKKLKPY | |
| | | SIEPKSCDKTHTCPPCPAPELLGGPSVFLF | |
| | | PPKPKDTLMISRTPEVTCVVVDVSHEDPEV | |
| | | KFNWYVDGVEVHNAKTKPREEQYGSTYRVV | |
| | | SVLTVLHQDWLNGKEYKCKVSNKALPAPIE | |
| | | KTISKAKGQPREPQVYTLPPSRDELTKNQV | |
| | | SLWCLVKGFYPSDIAVEWESNGQPENNYKT | |
| | | TPPVLDSDGSFFLYSKLTVDKSRWQQGNVF | |
| | | SCSVMHEALHNHYTQKSLSLSPGKGGSHHH | |
| | | HHH | |
| | Hole: | EVQLVESGGGLVQPGGSLRLSCAASGYTFT | |
| | | NYGMNWVRQAPGKGLEWVGWINTYTGEPTY | |
| | | AADFKRRFTFSLDTSKSTAYLQMNSLRAED | |
| | | TAVYYCAKYPHYYGSSHWYFDVWGQGTLVT | |
| | | VSSASTKGPSVFPLAPSSKSTSGGTAALGC | |
| | | LVKDYFPEPVTVSWNSGALTSGVHTFPAVL | |
| | | QSSGLYSLSSVVTVPSSSLGTQTYICNVNH | |
| | | KPSNTKVDKKVEPKSCDKTHTCPPCPAPEL | |
| | | LGGPSVFLFPPKPKDTLMISRTPEVTCVVV | |
| | | DVSHEDPEVKFNWYVDGVEVHNAKTKPREE | |
| | | QYGSTYRVVSVLTVLHQDWLNGKEYKCKVS | |
| | | NKALPAPIEKTISKAKGQPREPQVYTLPPS | |
| | | RDELTKNQVSLSCAVKGFYPSDIAVEWESN | |
| | | GQPENNYKTTPPVLDSDGSFFLVSKLTVDK | |
| | | SRWQQGNVFSCSVMHEALHNHYTQKSLSLS | |
| | | PGKGGSGAWSHPQFEK | |
| | L: | DIQMTQSPSSLSASVGDRVTITCSASQDIS | |
| | | NYLNWYQQKPGKAPKVLIYFTSSLHSGVPS | |
| | | RESGSGSGTDFTLTISSLQPEDFATYYCQQ | |
| | | YSTVPWTFGQGTKVEIKRTVAAPSVFIFPP | |
| | | SDEQLKSGTASVVCLLNNFYPREAKVQWKV | |
| | | DNALQSGNSQESVTEQDSKDSTYSLSSTLT | |
| | | LSKADYEKHKVYACEVTHQGLSSPVTKSFN | |
| | | RGEC | |
| CCL16 | Knob: | QPKVPEWVNTPSTCCLKYYEKVLPRRLVVG | |
| | | YRKALNCHLPAIIFVTKRNREVCTNPNDDW | |
| | | VQEYIKDPNLPLLPTRNLSTVKIITAKNGQ | |
| | | PQLLNSQEPKSCDKTHTCPPCPAPELLGGP | |
| | | SVFLFPPKPKDTLMISRTPEVTCVVVDVSH | |
| | | EDPEVKFNWYVDGVEVHNAKTKPREEQYGS | |
| | | TYRVVSVLTVLHQDWLNGKEYKCKVSNKAL | |
| | | PAPIEKTISKAKGQPREPQVYTLPPSRDEL | |
| | | TKNQVSLWCLVKGFYPSDIAVEWESNGQPE | |
| | | NNYKTTPPVLDSDGSFFLYSKLTVDKSRWQ | |
| | | QGNVFSCSVMHEALHNHYTQKSLSLSPGKG | |
| | | GSHHHHHH | |
| | Hole: | EVQLVESGGGLVQPGGSLRLSCAASGYTFT | |
| | | NYGMNWVRQAPGKGLEWVGWINTYTGEPTY | |
| | | AADFKRRFTFSLDTSKSTAYLQMNSLRAED | |
| | | TAVYYCAKYPHYYGSSHWYFDVWGQGTLVT | |
| | | VSSASTKGPSVFPLAPSSKSTSGGTAALGC | |
| | | LVKDYFPEPVTVSWNSGALTSGVHTFPAVL | |
| | | QSSGLYSLSSVVTVPSSSLGTQTYICNVNH | |
| | | KPSNTKVDKKVEPKSCDKTHTCPPCPAPEL | |
| | | LGGPSVFLFPPKPKDTLMISRTPEVTCVVV | |
| | | DVSHEDPEVKFNWYVDGVEVHNAKTKPREE | |
| | | QYGSTYRVVSVLTVLHQDWLNGKEYKCKVS | |
| | | NKALPAPIEKTISKAKGQPREPQVYTLPPS | |
| | | RDELTKNQVSLSCAVKGFYPSDIAVEWESN | |
| | | GQPENNYKTTPPVLDSDGSFFLVSKLTVDK | |
| | | SRWQQGNVFSCSVMHEALHNHYTQKSLSLS | |
| | | PGKGGSGAWSHPQFEK | |
| | L: | DIQMTQSPSSLSASVGDRVTITCSASQDIS | |
| | | NYLNWYQQKPGKAPKVLIYFTSSLHSGVPS | |
| | | RFSGSGSGTDFTLTISSLQPEDFATYYCQQ | |
| | | YSTVPWTFGQGTKVEIKRTVAAPSVFIFPP | |
| | | SDEQLKSGTASVVCLLNNFYPREAKVQWKV | |
| | | DNALQSGNSQESVTEQDSKDSTYSLSSTLT | |
| | | LSKADYEKHKVYACEVTHQGLSSPVTKSFN | |
| | | RGEC | |
| CCL17 | Knob: | ARGTNVGRECCLEYFKGAIPLRKLKTWYQT | |
| | | SEDCSRDAIVFVTVQGRAICSDPNNKRVKN | |
| | | AVKYLQSLERSEPKSCDKTHTCPPCPAPEL | |
| | | LGGPSVFLFPPKPKDTLMISRTPEVTCVVV | |
| | | DVSHEDPEVKFNWYVDGVEVHNAKTKPREE | |
| | | QYGSTYRVVSVLTVLHQDWLNGKEYKCKVS | |
| | | NKALPAPIEKTISKAKGQPREPQVYTLPPS | |
| | | RDELTKNQVSLWCLVKGFYPSDIAVEWESN | |
| | | GQPENNYKTTPPVLDSDGSFFLYSKLTVDK | |
| | | SRWQQGNVFSCSVMHEALHNHYTQKSLSLS | |
| | | PGKGGSHHHHHH | |
| | Hole: | EVQLVESGGGLVQPGGSLRLSCAASGYTFT | |
| | | NYGMNWVRQAPGKGLEWVGWINTYTGEPTY | |
| | | AADFKRRFTFSLDTSKSTAYLQMNSLRAED | |
| | | TAVYYCAKYPHYYGSSHWYFDVWGQGTLVT | |
| | | VSSASTKGPSVFPLAPSSKSTSGGTAALGC | |
| | | LVKDYFPEPVTVSWNSGALTSGVHTFPAVL | |
| | | QSSGLYSLSSVVTVPSSSLGTQTYICNVNH | |
| | | KPSNTKVDKKVEPKSCDKTHTCPPCPAPEL | |
| | | LGGPSVFLFPPKPKDTLMISRTPEVTCVVV | |
| | | DVSHEDPEVKFNWYVDGVEVHNAKTKPREE | |
| | | QYGSTYRVVSVLTVLHQDWLNGKEYKCKVS | |
| | | NKALPAPIEKTISKAKGQPREPQVYTLPPS | |
| | | RDELTKNQVSLSCAVKGFYPSDIAVEWESN | |
| | | GQPENNYKTTPPVLDSDGSFFLVSKLTVDK | |
| | | SRWQQGNVFSCSVMHEALHNHYTQKSLSLS | |
| | | PGKGGSGAWSHPQFEK | |
| | L: | DIQMTQSPSSLSASVGDRVTITCSASQDIS | |
| | | NYLNWYQQKPGKAPKVLIYFTSSLHSGVPS | |
| | | RFSGSGSGTDFTLTISSLQPEDFATYYCQQ | |
| | | YSTVPWTFGQGTKVEIKRTVAAPSVFIFPP | |
| | | SDEQLKSGTASVVCLLNNFYPREAKVQWKV | |
| | | DNALQSGNSQESVTEQDSKDSTYSLSSTLT | |
| | | LSKADYEKHKVYACEVTHQGLSSPVTKSFN | |
| | | RGEC | |
| CCL18 | Knob: | AQVGTNKELCCLVYTSWQIPQKFIVDYSET | |
| | | SPQCPKPGVILLTKRGRQICADPNKKWVQK | |
| | | YISDLKLNAEPKSCDKTHTCPPCPAPELLG | |
| | | GPSVFLFPPKPKDTLMISRTPEVTCVVVDV | |
| | | SHEDPEVKENWYVDGVEVHNAKTKPREEQY | |
| | | GSTYRVVSVLTVLHQDWLNGKEYKCKVSNK | |
| | | ALPAPIEKTISKAKGQPREPQVYTLPPSRD | |
| | | ELTKNQVSLWCLVKGFYPSDIAVEWESNGQ | |
| | | PENNYKTTPPVLDSDGSFF | |
| | | LYSKLTVDKSRWQQGNVFSCSVMHEALHNH | |
| | | YTQKSLSLSPGKGGSHHHHHH | |
| | Hole: | EVQLVESGGGLVQPGGSLRLSCAASGYTFT | |
| | | NYGMNWVRQAPGKGLEWVGWINTYTGEPTY | |
| | | AADFKRRFTFSLDTSKSTAYLQMNSLRAED | |
| | | TAVYYCAKYPHYYGSSHWYFDVWGQGTLVT | |
| | | VSSASTKGPSVFPLAPSSKSTSGGTAALGC | |
| | | LVKDYFPEPVTVSWNSGALTSGVHTFPAVL | |
| | | QSSGLYSLSSVVTVPSSSLGTQTYICNVNH | |
| | | KPSNTKVDKKVEPKSCDKTHTCPPCPAPEL | |
| | | LGGPSVFLFPPKPKDTLMISRTPEVTCVVV | |
| | | DVSHEDPEVKFNWYVDGVEVHNAKTKPREE | |
| | | QYGSTYRVVSVLTVLHQDWLNGKEYKCKVS | |
| | | NKALPAPIEKTISKAKGQPREPQVYTLPPS | |
| | | RDELTKNQVSLSCAVKGFYPSDIAVEWESN | |
| | | GQPENNYKTTPPVLDSDGSFFLVSKLTVDK | |
| | | SRWQQGNVFSCSVMHEALHNHYTQKSLSLS | |
| | | PGKGGSGAWSHPQFEK | |
| | L: | DIQMTQSPSSLSASVGDRVTITCSASQDIS | |
| | | NYLNWYQQKPGKAPKVLIYFTSSLHSGVPS | |
| | | RFSGSGSGTDFTLTISSLQPEDFATYYCQQ | |
| | | YSTVPWTFGQGTKVEIKRTVAAPSVFIFPP | |
| | | SDEQLKSGTASVVCLLNNFYPREAKVQWKV | |
| | | DNALQSGNSQESVTEQDSKDSTYSLSSTLT | |
| | | LSKADYEKHKVYACEVTHQGLSSPVTKSFN | |
| | | RGEC | |
| CCL19 | Knob: | GTNDAEDCCLSVTQKPIPGYIVRNFHYLLI | |
| | | KDGCRVPAVVFTTLRGRQLCAPPDQPWVER | |
| | | IIQRLQRTSAKMKRRSSEPKSCDKTHTCPP | |
| | | CPAPELLGGPSVFLFPPKPKDTLMISRTPE | |
| | | VTCVVVDVSHEDPEVKFNWYVDGVEVHNAK | |
| | | TKPREEQYGSTYRVVSVLTVLHQDWLNGKE | |
| | | YKCKVSNKALPAPIEKTISKAKGQPREPQV | |
| | | YTLPPSRDELTKNQVSLWCLVKGFYPSDIA | |
| | | VEWESNGQPENNYKTTPPVLDSDGSFFLYS | |
| | | KLTVDKSRWQQGNVFSCSVMHEALHNHYTQ | |
| | | KSLSLSPGKGGSHHHHHH | |
| | Hole: | EVQLVESGGGLVQPGGSLRLSCAASGYTFT | |
| | | NYGMNWVRQAPGKGLEWVGWINTYTGEPTY | |
| | | AADFKRRFTFSLDTSKSTAYLQMNSLRAED | |
| | | TAVYYCAKYPHYYGSSHWYFDVWGQGTLVT | |
| | | VSSASTKGPSVFPLAPSSKSTSGGTAALGC | |
| | | LVKDYFPEPVTVSWNSGALTSGVHTFPAVL | |
| | | QSSGLYSLSSVVTVPSSSLGTQTYICNVNH | |
| | | KPSNTKVDKKVEPKSCDKTHTCPPCPAPEL | |
| | | LGGPSVFLFPPKPKDTLMISRTPEVTCVVV | |
| | | DVSHEDPEVKFNWYVDGVEVHNAKTKPREE | |
| | | QYGSTYRVVSVLTVLHQDWLNGKEYKCKVS | |
| | | NKALPAPIEKTISKAKGQPREPQVYTLPPS | |
| | | RDELTKNQVSLSCAVKGFYPSDIAVEWESN | |
| | | GQPENNYKTTPPVLDSDGSFFLVSKLTVDK | |
| | | SRWQQGNVFSCSVMHEALHNHYTQKSLSLS | |
| | | PGKGGSGAWSHPQFEK | |
| | L: | DIQMTQSPSSLSASVGDRVTITCSASQDIS | |
| | | NYLNWYQQKPGKAPKVLIYFTSSLHSGVPS | |
| | | RFSGSGSGTDFTLTISSLQPEDFATYYCQQ | |
| | | YSTVPWTFGQGTKVEIKRTVAAPSVFIFPP | |
| | | SDEQLKSGTASVVCLLNNFYPREAKVQWKV | |
| | | DNALQSGNSQESVTEQDSKDSTYSLSSTLT | |
| | | LSKADYEKHKVYACEVTHQGLSSPVTKSFN | |
| | | RGEC | |
| CCL20 | Knob: | ASNFDCCLGYTDRILHPKFIVGFTRQLANE | |
| | | GCDINAIIFHTKKKLSVCANPKQTWVKYIV | |
| | | RLLSKKVKNMEPKSCDKTHTCPPCPAPELL | |
| | | GGPSVFLFPPKPKDTLMISRTPEVTCVVVD | |
| | | VSHEDPEVKENWYVDGVEVHNAKTKPREEQ | |
| | | YGSTYRVVSVLTVLHQDWLNGKE | |
| | | YKCKVSNKALPAPIEKTISKAKGQPREPQV | |
| | | YTLPPSRDELTKNQVSLWCLVKGFYPSDIA | |
| | | VEWESNGQPENNYKTTPPVLDSDGSFFLYS | |
| | | KLTVDKSRWQQGNVFSCSVMHEALHNHYTQ | |
| | | KSLSLSPGKGGSHHHHHH | |
| | Hole: | EVQLVESGGGLVQPGGSLRLSCAASGYTFT | |
| | | NYGMNWVRQAPGKGLEWVGWINTYTGEPTY | |
| | | AADFKRRFTFSLDTSKSTAYLQMNSLRAED | |
| | | TAVYYCAKYPHYYGSSHWYFDVWGQGTLVT | |
| | | VSSASTKGPSVFPLAPSSKSTSGGTAALGC | |
| | | LVKDYFPEPVTVSWNSGALTSGVHTFPAVL | |
| | | QSSGLYSLSSVVTVPSSSLGTQTYICNVNH | |
| | | KPSNTKVDKKVEPKSCDKTHTCPPCPAPEL | |
| | | LGGPSVFLFPPKPKDTLMISRTPEVTCVVV | |
| | | DVSHEDPEVKFNWYVDGVEVHNAKTKPREE | |
| | | QYGSTYRVVSVLTVLHQDWLNGKEYKCKVS | |
| | | NKALPAPIEKTISKAKGQPREPQVYTLPPS | |
| | | RDELTKNQVSLSCAVKGFYPSDIAVEWESN | |
| | | GQPENNYKTTPPVLDSDGSFFLVSKLTVDK | |
| | | SRWQQGNVFSCSVMHEALHNHYTQKSLSLS | |
| | | PGKGGSGAWSHPQFEK | |
| | L: | DIQMTQSPSSLSASVGDRVTITCSASQDIS | |
| | | NYLNWYQQKPGKAPKVLIYFTSSLHSGVPS | |
| | | RFSGSGSGTDFTLTISSLQPEDFATYYCQQ | |
| | | YSTVPWTFGQGTKVEIKRTVAAPSVFIFPP | |
| | | SDEQLKSGTASVVCLLNNFYPREAKVQWKV | |
| | | DNALQSGNSQESVTEQDSKDSTYSLSSTLT | |
| | | LSKADYEKHKVYACEVTHQGLSSPVTKSFN | |
| | | RGEC | |
| CCL21 | Knob: | SDGGAQDCCLKYSQRKIPAKVVRSYRKQEP | |
| | | SLGCSIPAILFLPRKRSQAELCADPKELWV | |
| | | QQLMQHLDKTPSPQKPAQGCRKDRGASKTG | |
| | | KKGKGSKGCKRTERSQTPKGPEPKSCDKTH | |
| | | TCPPCPAPELLGGPSVFLFPPKPKDTLMIS | |
| | | RTPEVTCVVVDVSHEDPEVKFNWYVDGVEV | |
| | | HNAKTKPREEQYGSTYRVVSVLTVLHQDWL | |
| | | NGKEYKCKVSNKALPAPIEKTISKAKGQPR | |
| | | EPQVYTLPPSRDELTKNQVSLWCLVKGFYP | |
| | | SDIAVEWESNGQPENNYKTTPPVLDSDGSF | |
| | | FLYSKLTVDKSRWQQGNVFSCSVMHEALHN | |
| | | HYTQKSLSLSPGKGGSHHHHHH | |
| | Hole: | EVQLVESGGGLVQPGGSLRLSCAASGYTFT | |
| | | NYGMNWVRQAPGKGLEWVGWINTYTGEPTY | |
| | | AADFKRRFTFSLDTSKSTAYLQMNSLRAED | |
| | | TAVYYCAKYPHYYGSSHWYFDVWGQGTLVT | |
| | | VSSASTKGPSVFPLAPSSKSTSGGTAALGC | |
| | | LVKDYFPEPVTVSWNSGALTSGVHTFPAVL | |
| | | QSSGLYSLSSVVTVPSSSLGTQTYICNVNH | |
| | | KPSNTKVDKKVEPKSCDKTHTCPPCPAPEL | |
| | | LGGPSVFLFPPKPKDTLMISRTPEVTCVVV | |
| | | DVSHEDPEVKFNWYVDGVEVHNAKTKPREE | |
| | | QYGSTYRVVSVLTVLHQDWLNGKEYKCKVS | |
| | | NKALPAPIEKTISKAKGQPREPQVYTLPPS | |
| | | RDELTKNQVSLSCAVKGFYPSDIAVEWESN | |
| | | GQPENNYKTTPPVLDSDGSFFLVSKLTVDK | |
| | | SRWQQGNVFSCSVMHEALHNHYTQKSLSLS | |
| | | PGKGGSGAWSHPQFEK | |
| | L: | DIQMTQSPSSLSASVGDRVTITCSASQDIS | |
| | | NYLNWYQQKPGKAPKVLIYFTSSLHSGVPS | |
| | | RFSGSGSGTDFTLTISSLQPEDFATYYCQQ | |
| | | YSTVPWTFGQGTKVEIKRTVAAPSVFIFPP | |
| | | SDEQLKSGTASVVCLLNNFYPREAKVQWKV | |
| | | DNALQSGNSQESVTEQDSKDSTYSLSSTLT | |
| | | LSKADYEKHKVYACEVTHQGLSSPVTKSFN | |
| | | RGEC | |
| CCL22 | Knob: | GPYGANMEDSVCCRDYVRYRLPLRVVKHFY | |
| | | WTSDSCPRPGVVLLTFRDKEICADPRVPWV | |
| | | KMILNKLSQEPKSCDKTHTCPPCPAPELLG | |
| | | GPSVFLFPPKPKDTLMISRTPEVTCVVVDV | |
| | | SHEDPEVKENWYVDGVEVHNAKTKPREEQY | |
| | | GSTYRVVSVLTVLHQDWLNGKEYKCKVSNK | |
| | | ALPAPIEKTISKAKGQPREPQVYTLPPSRD | |
| | | ELTKNQVSLWCLVKGFYPSDIAVEWESNGQ | |
| | | PENNYKTTPPVLDSDGSFFLYSKLTVDKSR | |
| | | WQQGNVFSCSVMHEALHNHYTQKSLSLSPG | |
| | | KGGSHHHHHH | |
| | Hole: | EVQLVESGGGLVQPGGSLRLSCAASGYTFT | |
| | | NYGMNWVRQAPGKGLEWVGWINTYTGEPTY | |
| | | AADFKRRFTFSLDTSKSTAYLQMNSLRAED | |
| | | TAVYYCAKYPHYYGSSHWYFDVWGQGTLVT | |
| | | VSSASTKGPSVFPLAPSSKSTSGGTAALGC | |
| | | LVKDYFPEPVTVSWNSGALTSGVHTFPAVL | |
| | | QSSGLYSLSSVVTVPSSSLGTQTYICNVNH | |
| | | KPSNTKVDKKVEPKSCDKTHTCPPCPAPEL | |
| | | LGGPSVFLFPPKPKDTLMISRTPEVTCVVV | |
| | | DVSHEDPEVKFNWYVDGVEVHNAKTKPREE | |
| | | QYGSTYRVVSVLTVLHQDWLNGKEYKCKVS | |
| | | NKALPAPIEKTISKAKGQPREPQVYTLPPS | |
| | | RDELTKNQVSLSCAVKGFYPSDIAVEWESN | |
| | | GQPENNYKTTPPVLDSDGSFFLVSKLTVDK | |
| | | SRWQQGNVFSCSVMHEALHNHYTQKSLSLS | |
| | | PGKGGSGAWSHPQFEK | |
| | L: | DIQMTQSPSSLSASVGDRVTITCSASQDIS | |
| | | NYLNWYQQKPGKAPKVLIYFTSSLHSGVPS | |
| | | RFSGSGSGTDFTLTISSLQPEDFATYYCQQ | |
| | | YSTVPWTFGQGTKVEIKRTVAAPSVFIFPP | |
| | | SDEQLKSGTASVVCLLNNFYPREAKVQWKV | |
| | | DNALQSGNSQESVTEQDSKDSTYSLSSTLT | |
| | | LSKADYEKHKVYACEVTHQGLSSPVTKSFN | |
| | | RGEC | |
| CCL23 | Knob: | RVTKDAETEFMMSKLPLENPVLLDRFHATS | |
| | | ADCCISYTPRSIPCSLLESYFETNSECSKP | |
| | | GVIFLTKKGRRFCANPSDKQVQVCVRMLKL | |
| | | DTRIKTRKNEPKSCDKTHTCPPCPAPELLG | |
| | | GPSVFLFPPKPKDTLMISRTPEVTCVVVDV | |
| | | SHEDPEVKFNWYVDGVEVHNAKTKPREEQY | |
| | | GSTYRVVSVLTVLHQDWLNGKEYKCKVSNK | |
| | | ALPAPIEKTISKAKGQPREPQVYTLPPSRD | |
| | | ELTKNQVSLWCLVKGFYPSDIAVEWESNGQ | |
| | | PENNYKTTPPVLDSDGSFFLYSKLTVDKSR | |
| | | WQQGNVFSCSVMHEALHNHYTQKSLSLSPG | |
| | | KGGSHHHHHH | |
| | Hole: | EVQLVESGGGLVQPGGSLRLSCAASGYTFT | |
| | | NYGMNWVRQAPGKGLEWVGWINTYTGEPTY | |
| | | AADFKRRFTFSLDTSKSTAYLQMNSLRAED | |
| | | TAVYYCAKYPHYYGSSHWYFDVWGQGTLVT | |
| | | VSSASTKGPSVFPLAPSSKSTSGGTAALGC | |
| | | LVKDYFPEPVTVSWNSGALTSGVHTFPAVL | |
| | | QSSGLYSLSSVVTVPSSSLGTQTYICNVNH | |
| | | KPSNTKVDKKVEPKSCDKTHTCPPCPAPEL | |
| | | LGGPSVFLFPPKPKDTLMISRTPEVTCVVV | |
| | | DVSHEDPEVKFNWYVDGVEVHNAKTKPREE | |
| | | QYGSTYRVVSVLTVLHQDWLNGKEYKCKVS | |
| | | NKALPAPIEKTISKAKGQPREPQVYTLPPS | |
| | | RDELTKNQVSLSCAVKGFYPSDIAVEWESN | |
| | | GQPENNYKTTPPVLDSDGSFFLVSKLTVDK | |
| | | SRWQQGNVFSCSVMHEALHNHYTQKSLSLS | |
| | | PGKGGSGAWSHPQFEK | |
| | L: | DIQMTQSPSSLSASVGDRVTITCSASQDIS | |
| | | NYLNWYQQKPGKAPKVLIYFTSSLHSGVPS | |
| | | RFSGSGSGTDFTLTISSLQPEDFATYYCQQ | |
| | | YSTVPWTFGQGTKVEIKRTVAAPSVFIFPP | |
| | | SDEQLKSGTASVVC | |
| | | LLNNFYPREAKVQWKVDNALQSGNSQESVT | |
| | | EQDSKDSTYSLSSTLTLSKADYEKHKVYAC | |
| | | EVTHQGLSSPVTKSFNRGEC | |
| CCL24 | Knob: | VVIPSPCCMFFVSKRIPENRVVSYQLSSRS | |
| | | TCLKAGVIFTTKKGQQFCGDPKQEWVQRYM | |
| | | KNLDAKQKKASPRARAVAEPKSCDKTHTCP | |
| | | PCPAPELLGGPSVFLFPPKPKDTLMISRTP | |
| | | EVTCVVVDVSHEDPEVKFNWYVDGVEVHNA | |
| | | KTKPREEQYGSTYRVVSVLTVLHQDWLNGK | |
| | | EYKCKVSNKALPAPIEKTISKAKGQPREPQ | |
| | | VYTLPPSRDELTKNQVSLWCLVKGFYPSDI | |
| | | AVEWESNGQPENNYKTTPPVLDSDGSFFLY | |
| | | SKLTVDKSRWQQGNVFSCSVMHEALHNHYT | |
| | | QKSLSLSPGKGGSHHHHHH | |
| | Hole: | EVQLVESGGGLVQPGGSLRLSCAASGYTFT | |
| | | NYGMNWVRQAPGKGLEWVGWINTYTGEPTY | |
| | | AADFKRRFTFSLDTSKSTAYLQMNSLRAED | |
| | | TAVYYCAKYPHYYGSSHWYFDVWGQGTLVT | |
| | | VSSASTKGPSVFPLAPSSKSTSGGTAALGC | |
| | | LVKDYFPEPVTVSWNSGALTSGVHTFPAVL | |
| | | QSSGLYSLSSVVTVPSSSLGTQTYICNVNH | |
| | | KPSNTKVDKKVEPKSCDKTHTCPPCPAPEL | |
| | | LGGPSVFLFPPKPKDTLMISRTPEVTCVVV | |
| | | DVSHEDPEVKFNWYVDGVEVHNAKTKPREE | |
| | | QYGSTYRVVSVLTVLHQDWLNGKEYKCKVS | |
| | | NKALPAPIEKTISKAKGQPREPQVYTLPPS | |
| | | RDELTKNQVSLSCAVKGFYPSDIAVEWESN | |
| | | GQPENNYKTTPPVLDSDGSFFLVSKLTVDK | |
| | | SRWQQGNVFSCSVMHEALHNHYTQKSLSLS | |
| | | PGKGGSGAWSHPQFEK | |
| | L: | DIQMTQSPSSLSASVGDRVTITCSASQDIS | |
| | | NYLNWYQQKPGKAPKVLIYFTSSLHSGVPS | |
| | | RFSGSGSGTDFTLTISSLQPEDFATYYCQQ | |
| | | YSTVPWTFGQGTKVEIKRTVAAPSVFIFPP | |
| | | SDEQLKSGTASVVCLLNNFYPREAKVQWKV | |
| | | DNALQSGNSQESVTEQDSKDSTYSLSSTLT | |
| | | LSKADYEKHKVYACEVTHQGLSSPVTKSFN | |
| | | RGEC | |
| CCL25 | Knob: | QGVFEDCCLAYHYPIGWAVLRRAWTYRIQE | |
| | | VSGSCNLPAAIFYLPKRHRKVCGNPKSREV | |
| | | QRAMKLLDARNKVFAKLHHNTQTFQAGPHA | |
| | | VKKLSSGNSKLSSSKFSNPISSSKRNVSLL | |
| | | ISANSGLEPKSCDKTHTCPPCPAPELLGGP | |
| | | SVFLFPPKPKDTLMISRTPEVTCVVVDVSH | |
| | | EDPEVKFNWYVDGVEVHNAKTKPREEQYGS | |
| | | TYRVVSVLTVLHQDWLNGKEYKCKVSNKAL | |
| | | PAPIEKTISKAKGQPREPQVYTLPPSRDEL | |
| | | TKNQVSLWCLVKGFYPSDIAVEWESNGQPE | |
| | | NNYKTTPPVLDSDGSFFLYSKLTVDKSRWQ | |
| | | QGNVFSCSVMHEALHNHYTQKSLSLSPGKG | |
| | | GSHHHHHH | |
| | Hole: | EVQLVESGGGLVQPGGSLRLSCAASGYTFT | |
| | | NYGMNWVRQAPGKGLEWVGWINTYTGEPTY | |
| | | AADFKRRFTFSLDTSKSTAYLQMNSLRAED | |
| | | TAVYYCAKYPHYYGSSHWYFDVWGQGTLVT | |
| | | VSSASTKGPSVFPLAPSSKSTSGGTAALGC | |
| | | LVKDYFPEPVTVSWNSGALTSGVHTFPAVL | |
| | | QSSGLYSLSSVVTVPSSSLGTQTYICNVNH | |
| | | KPSNTKVDKKVEPKSCDKTHTCPPCPAPEL | |
| | | LGGPSVFLFPPKPKDTLMISRTPEVTCVVV | |
| | | DVSHEDPEVKFNWYVDGVEVHNAKTKPREE | |
| | | QYGSTYRVVSVLTVLHQDWLNGKEYKCKVS | |
| | | NKALPAPIEKTISKAKGQPREPQVYTLPPS | |
| | | RDELTKNQVSLSCAVKGFYPSDIAVEWESN | |
| | | GQPENNYKTTPPVLDSDGSFFLVSKLTVDK | |
| | | SRWQQGNVFSCSVMHEALHNHYTQKSLSLS | |
| | | PGKGGSGAWSHPQFEK | |
| | L: | DIQMTQSPSSLSASVGDRVTITCSASQDIS | |
| | | NYLNWYQQKPGKAPKVLIYFTSSLHSGVPS | |
| | | RFSGSGSGTDFTLTISSLQPEDFATYYCQQ | |
| | | YSTVPWTFGQGTKVEIKRTVAAPSVFIFPP | |
| | | SDEQLKSGTASVVCLLNNFYPREAKVQWKV | |
| | | DNALQSGNSQESVTEQDSKDSTYSLSSTLT | |
| | | LSKADYEKHKVYACEVTHQGLSSPVTKSFN | |
| | | RGEC | |
| CCL26 | Knob: | TRGSDISKTCCFQYSHKPLPWTWVRSYEFT | |
| | | SNSCSQRAVIFTTKRGKKVCTHPRKKWVQK | |
| | | YISLLKTPKQLEPKSCDKTHTCPPCPAPEL | |
| | | LGGPSVFLFPPKPKDTLMISRTPEVTCVVV | |
| | | DVSHEDPEVKFNWYVDGVEVHNAKTKPREE | |
| | | QYGSTYRVVSVLTVLHQDWLNGKEYKCKVS | |
| | | NKALPAPIEKTISKAKGQPREPQVYTLPPS | |
| | | RDELTKNQVSLWCLVKGFYPSDIAVEWESN | |
| | | GQPENNYKTTPPVLDSDGSFFLYSKLTVDK | |
| | | SRWQQGNVFSCSVMHEALHNHYTQKSLSLS | |
| | | PGKGGSHHHHHH | |
| | Hole: | EVQLVESGGGLVQPGGSLRLSCAASGYTFT | |
| | | NYGMNWVRQAPGKGLEWVGWINTYTGEPTY | |
| | | AADFKRRFTFSLDTSKSTAYLQMNSLRAED | |
| | | TAVYYCAKYPHYYGSSHWYFDVWGQGTLVT | |
| | | VSSASTKGPSVFPLAPSSKSTSGGTAALGC | |
| | | LVKDYFPEPVTVSWNSGALTSGVHTFPAVL | |
| | | QSSGLYSLSSVVTVPSSSLGTQTYICNVNH | |
| | | KPSNTKVDKKVEPKSCDKTHTCPPCPAPEL | |
| | | LGGPSVFLFPPKPKDTLMISRTPEVTCVVV | |
| | | DVSHEDPEVKFNWYVDGVEVHNAKTKPREE | |
| | | QYGSTYRVVSVLTVLHQDWLNGKEYKCKVS | |
| | | NKALPAPIEKTISKAKGQPREPQVYTLPPS | |
| | | RDELTKNQVSLSCAVKGFYPSDIAVEWESN | |
| | | GQPENNYKTTPPVLDSDGSFFLVSKLTVDK | |
| | | SRWQQGNVFSCSVMHEALHNHYTQKSLSLS | |
| | | PGKGGSGAWSHPQFEK | |
| | L: | DIQMTQSPSSLSASVGDRVTITCSASQDIS | |
| | | NYLNWYQQKPGKAPKVLIYFTSSLHSGVPS | |
| | | RFSGSGSGTDFTLTISSLQPEDFATYYCQQ | |
| | | YSTVPWTFGQGTKVEIKRTVAAPSVFIFPP | |
| | | SDEQLKSGTASVVCLLNNFYPREAKVQWKV | |
| | | DNALQSGNSQESVTEQDSKDSTYSLSSTLT | |
| | | LSKADYEKHKVYACEVTHQGLSSPVTKSFN | |
| | | RGEC | |
| CCL27 | Knob: | FLLPPSTACCTQLYRKPLSDKLLRKVIQVE | |
| | | LQEADGDCHLQAFVLHLAQRSICIHPQNPS | |
| | | LSQWFEHQERKLHGTLPKLNFGMLRKMGEP | |
| | | KSCDKTHTCPPCPAPELLGGPSVFLFPPKP | |
| | | KDTLMISRTPEVTCVVVDVSHEDPEVKFNW | |
| | | YVDGVEVHNAKTKPREEQYGSTYRVVSVLT | |
| | | VLHQDWLNGKEYKCKVSNKALPAPIEKTIS | |
| | | KAKGQPREPQVYTLPPSRDELTKNQVSLWC | |
| | | LVKGFYPSDIAVEWESNGQPENNYKTTPPV | |
| | | LDSDGSFFLYSKLTVDKSRWQQGNVFSCSV | |
| | | MHEALHNHYTQKSLSLSPGKGGSHHHHHH | |
| | Hole: | EVQLVESGGGLVQPGGSLRLSCAASGYTFT | |
| | | NYGMNWVRQAPGKGLEWVGWINTYTGEPTY | |
| | | AADFKRRFTFSLDTSKSTAYLQMNSLRAED | |
| | | TAVYYCAKYPHYYGSSHWYFDVWGQGTLVT | |
| | | VSSASTKGPSVFPLAPSSKSTSGGTAALGC | |
| | | LVKDYFPEPVTVSWNSGALTSGVHTFPAVL | |
| | | QSSGLYSLSSVVTVPSSSLGTQTYICNVNH | |
| | | KPSNTKVDKKVEPKSCDKTHTCPPCPAPEL | |
| | | LGGPSVFLFPPKPKDTLMISRTPEVTCVVV | |
| | | DVSHEDPEVKFNWYVDGVEVHNAKTKPREE | |
| | | QYGSTYRVVSVLTVLHQDWLNGKEYKCKVS | |
| | | NKALPAPIEKTISKAKGQPREPQVYTLPPS | |
| | | RDELTKNQVSLSCAVKGFYPSDIAVEWESN | |
| | | GQPENNYKTTPPVLDSDGSFFLVSKLTVDK | |
| | | SRWQQGNVFSCSVMHEALHNHYTQKSLSLS | |
| | | PGKGGSGAWSHPQFEK | |
| | L: | DIQMTQSPSSLSASVGDRVTITCSASQDIS | |
| | | NYLNWYQQKPGKAPKVLIYFTSSLHSGVPS | |
| | | RFSGSGSGTDFTLTISSLQPEDFATYYCQQ | |
| | | YSTVPWTFGQGTKVEIKRTVAAPSVFIFPP | |
| | | SDEQLKSGTASVVCLLNNFYPREAKVQWKV | |
| | | DNALQSGNSQESVTEQDSKDSTYSLSSTLT | |
| | | LSKADYEKHKVYACEVTHQGLSSPVTKSFN | |
| | | RGEC | |
| CCL28 | Knob: | SEAILPIASSCCTEVSHHISRRLLERVNMC | |
| | | RIQRADGDCDLAAVILHVKRRRICVSPHNH | |
| | | TVKQWMKVQAAKKNGKGNVCHRKKHHGKRN | |
| | | SNRAHQGKHETYGHKTPYEPKSCDKTHTCP | |
| | | PCPAPELLGGPSVFLFPPKPKDTLMISRTP | |
| | | EVTCVVVDVSHEDPEVKFNWYVDGVEVHNA | |
| | | KTKPREEQYGSTYRVVSVLTVLHQDWLNGK | |
| | | EYKCKVSNKALPAPIEKTISKAKGQPREPQ | |
| | | VYTLPPSRDELTKNQVSLWCLVKGFYPSDI | |
| | | AVEWESNGQPENNYKTTPPVLDSDGSFFLY | |
| | | SKLTVDKSRWQQGNVFSCSVMHEALHNHYT | |
| | | QKSLSLSPGKGGSHHHHHH | |
| | Hole: | EVQLVESGGGLVQPGGSLRLSCAASGYTFT | |
| | | NYGMNWVRQAPGKGLEWVGWINTYTGEPTY | |
| | | AADFKRRFTFSLDTSKSTAYLQMNSLRAED | |
| | | TAVYYCAKYPHYYGSSHWYFDVWGQGTLVT | |
| | | VSSASTKGPSVFPLAPSSKSTSGGTAALGC | |
| | | LVKDYFPEPVTVSWNSGALTSGVHTFPAVL | |
| | | QSSGLYSLSSVVTVPSSSLGTQTYICNVNH | |
| | | KPSNTKVDKKVEPKSCDKTHTCPPCPAPEL | |
| | | LGGPSVFLFPPKPKDTLMISRTPEVTCVVV | |
| | | DVSHEDPEVKFNWYVDGVEVHNAKTKPREE | |
| | | QYGSTYRVVSVLTVLHQDWLNGKEYKCKVS | |
| | | NKALPAPIEKTISKAKGQPREPQVYTLPPS | |
| | | RDELTKNQVSLSCAVKGFYPSDIAVEWESN | |
| | | GQPENNYKTTPPVLDSDGSFFLVSKLTVDK | |
| | | SRWQQGNVFSCSVMHEALHNHYTQKSLSLS | |
| | | PGKGGSGAWSHPQFEK | |
| | L: | DIQMTQSPSSLSASVGDRVTITCSASQDIS | |
| | | NYLNWYQQKPGKAPKVLIYFTSSLHSGVPS | |
| | | RFSGSGSGTDFTLTISSLQPEDFATYYCQQ | |
| | | YSTVPWTFGQGTKVEIKRTVAAPSVFIFPP | |
| | | SDEQLKSGTASVVCLLNNFYPREAKVQWKV | |
| | | DNALQSGNSQESVTEQDSKDSTYSLSSTLT | |
| | | LSKADYEKHKVYACEVTHQGLSSPVTKSFN | |
| | | RGEC | |
| CX3CL1 | Knob: | QHHGVTKCNITCSKMTSKIPVALLIHYQQN | |
| | | QASCGKRAIILETRQHRLFCADPKEQWVKD | |
| | | AMQHLDRQAAALTRNGEPKSCDKTHTCPPC | |
| | | PAPELLGGPSVFLFPPKPKDTLMISRTPEV | |
| | | TCVVVDVSHEDPEVKFNWYVDGVEVHNAKT | |
| | | KPREEQYGSTYRVVSVLTVLHQDWLNGKEY | |
| | | KCKVSNKALPAPIEKTISKAKGQPREPQVY | |
| | | TLPPSRDELTKNQVSLWCLVKGFYPSDIAV | |
| | | EWESNGQPENNYKTTPPVLDSDGSFFLYSK | |
| | | LTVDKSRWQQGNVFSCSVMHEALHNHYTQK | |
| | | SLSLSPGKGGSHHHHHH | |
| | Hole: | EVQLVESGGGLVQPGGSLRLSCAASGYTFT | |
| | | NYGMNWVRQAPGKGLEWVGWINTYTGEPTY | |
| | | AADFKRRFTFSLDTSKSTAYLQMNSLRAED | |
| | | TAVYYCAKYPHYYGSSHWYFDVWGQGTLVT | |
| | | VSSASTKGPSVFPLAPSSKSTSGGTAALGC | |
| | | LVKDYFPEPVTVSWNSGALTSGVHTFPAVL | |
| | | QSSGLYSLSSVVTVPSSSLGTQTYICNVNH | |
| | | KPSNTKVDKKVEPKSCDKTHTCPPCPAPEL | |
| | | LGGPSVFLFPPKPKDTLMI | |
| | | SRTPEVTCVVVDVSHEDPEVKFNWYVDGVE | |
| | | VHNAKTKPREEQYGSTYRVVSVLTVLHQDW | |
| | | LNGKEYKCKVSNKALPAPIEKTISKAKGQP | |
| | | REPQVYTLPPSRDELTKNQVSLSCAVKGFY | |
| | | PSDIAVEWESNGQPENNYKTTPPVLDSDGS | |
| | | FFLVSKLTVDKSRWQQGNVFSCSVMHEALH | |
| | | NHYTQKSLSLSPGKGGSGAWSHPQFEK | |
| | L: | DIQMTQSPSSLSASVGDRVTITCSASQDIS | |
| | | NYLNWYQQKPGKAPKVLIYFTSSLHSGVPS | |
| | | RFSGSGSGTDFTLTISSLQPEDFATYYCQQ | |
| | | YSTVPWTFGQGTKVEIKRTVAAPSVFIFPP | |
| | | SDEQLKSGTASVVCLLNNFYPREAKVQWKV | |
| | | DNALQSGNSQESVTEQDSKDSTYSLSSTLT | |
| | | LSKADYEKHKVYACEVTHQGLSSPVTKSFN | |
| | | RGEC | |
| XCL1,2 | Knob: | VGSEVSDKRTCVSLTTQRLPVSRIKTYTIT | |
| | | EGSLRAVIFITKRGLKVCADPQATWVRDVV | |
| | | RSMDRKSNTRNNMIQTKPTGTQQSTNTAVT | |
| | | LTGEPKSCDKTHTCPPCPAPELLGGPSVFL | |
| | | FPPKPKDTLMISRTPEVTCVVVDVSHEDPE | |
| | | VKFNWYVDGVEVHNAKTKPREEQYGSTYRV | |
| | | VSVLTVLHQDWLNGKEYKCKVSNKALPAPI | |
| | | EKTISKAKGQPREPQVYTLPPSRDELTKNQ | |
| | | VSLWCLVKGFYPSDIAVEWESNGQPENNYK | |
| | | TTPPVLDSDGSFFLYSKLTVDKSRWQQGNV | |
| | | FSCSVMHEALHNHYTQKSLSLSPGKGGSHH | |
| | | HHHH | |
| | Hole: | EVQLVESGGGLVQPGGSLRLSCAASGYTFT | |
| | | NYGMNWVRQAPGKGLEWVGWINTYTGEPTY | |
| | | AADFKRRFTFSLDTSKSTAYLQMNSLRAED | |
| | | TAVYYCAKYPHYYGSSHWYFDVWGQGTLVT | |
| | | VSSASTKGPSVFPLAPSSKSTSGGTAALGC | |
| | | LVKDYFPEPVTVSWNSGALTSGVHTFPAVL | |
| | | QSSGLYSLSSVVTVPSSSLGTQTYICNVNH | |
| | | KPSNTKVDKKVEPKSCDKTHTCPPCPAPEL | |
| | | LGGPSVFLFPPKPKDTLMISRTPEVTCVVV | |
| | | DVSHEDPEVKFNWYVDGVEVHNAKTKPREE | |
| | | QYGSTYRVVSVLTVLHQDWLNGKEYKCKVS | |
| | | NKALPAPIEKTISKAKGQPREPQVYTLPPS | |
| | | RDELTKNQVSLSCAVKGFYPSDIAVEWESN | |
| | | GQPENNYKTTPPVLDSDGSFFLVSKLTVDK | |
| | | SRWQQGNVFSCSVMHEALHNHYTQKSLSLS | |
| | | PGKGGSGAWSHPQFEK | |
| | L: | DIQMTQSPSSLSASVGDRVTITCSASQDIS | |
| | | NYLNWYQQKPGKAPKVLIYFTSSLHSGVPS | |
| | | RFSGSGSGTDFTLTISSLQPEDFATYYCQQ | |
| | | YSTVPWTFGQGTKVEIKRTVAAPSVFIFPP | |
| | | SDEQLKSGTASVVCLLNNFYPREAKVQWKV | |
| | | DNALQSGNSQESVTEQDSKDSTYSLSSTLT | |
| | | LSKADYEKHKVYACEVTHQGLSSPVTKSFN | |
| | | RGEC | |
| FGF-1 | Knob: | FNLPPGNYKKPKLLYCSNGGHFLRILPDGT | |
| | | VDGTRDRSDQHIQLQLSAESVGEVYIKSTE | |
| | | TGQYLAMDTDGLLYGSQTPNEECLFLERLE | |
| | | ENHYNTYISKKHAEKNWFVGLKKNGSCKRG | |
| | | PRTHYGQKAILFLPLPVSSDEPKSCDKTHT | |
| | | CPPCPAPELLGGPSVFLFPPKPKDTLMISR | |
| | | TPEVTCVVVDVSHEDPEVKFNWYVDGVEVH | |
| | | NAKTKPREEQYGSTYRVVSVLTVLHQDWLN | |
| | | GKEYKCKVSNKALPAPIEKTISKAKGQPRE | |
| | | PQVYTLPPSRDELTKNQVSLWCLVKGFYPS | |
| | | DIAVEWESNGQPENNYKTTPPVLDSDGSFF | |
| | | LYSKLTVDKSRWQQGNVFSCSVMHEALHNH | |
| | | YTQKSLSLSPGKGGSHHHHHH | |
| | Hole: | EVQLVESGGGLVQPGGSLRLSCAASGYTFT | |
| | | NYGMNWVRQAPGKGLEWVGWINTYTGEPTY | |
| | | AADFKRRFTFSLDTSKSTAYLQMNSLRAED | |
| | | TAVYYCAKYPHYYGSSHWYFDVWGQGTLVT | |
| | | VSSASTK | |
| | | GPSVFPLAPSSKSTSGGTAALGCLVKDYFP | |
| | | EPVTVSWNSGALTSGVHTFPAVLQSSGLYS | |
| | | LSSVVTVPSSSLGTQTYICNVNHKPSNTKV | |
| | | DKKVEPKSCDKTHTCPPCPAPELLGGPSVF | |
| | | LFPPKPKDTLMISRTPEVTCVVVDVSHEDP | |
| | | EVKFNWYVDGVEVHNAKTKPREEQYGSTYR | |
| | | VVSVLTVLHQDWLNGKEYKCKVSNKALPAP | |
| | | IEKTISKAKGQPREPQVYTLPPSRDELTKN | |
| | | QVSLSCAVKGFYPSDIAVEWESNGQPENNY | |
| | | KTTPPVLDSDGSFFLVSKLTVDKSRWQQGN | |
| | | VFSCSVMHEALHNHYTQKSLSLSPGKGGSG | |
| | | AWSHPQFEK | |
| | L: | DIQMTQSPSSLSASVGDRVTITCSASQDIS | |
| | | NYLNWYQQKPGKAPKVLIYFTSSLHSGVPS | |
| | | RFSGSGSGTDFTLTISSLQPEDFATYYCQQ | |
| | | YSTVPWTFGQGTKVEIKRTVAAPSVFIFPP | |
| | | SDEQLKSGTASVVCLLNNFYPREAKVQWKV | |
| | | DNALQSGNSQESVTEQDSKDSTYSLSSTLT | |
| | | LSKADYEKHKVYACEVTHQGLSSPVTKSFN | |
| | | RGEC | |
| FGF-2 | Knob: | PALPEDGGSGAFPPGHFKDPKRLYCKNGGF | |
| | | FLRIHPDGRVDGVREKSDPHIKLQLQAEER | |
| | | GVVSIKGVCANRYLAMKEDGRLLASKCVTD | |
| | | ECFFFERLESNNYNTYRSRKYTSWYVALKR | |
| | | TGQYKLGSKTGPGQKAILFLPMSAKSEPKS | |
| | | CDKTHTCPPCPAPELLGGPSVFLFPPKPKD | |
| | | TLMISRTPEVTCVVVDVSHEDPEVKFNWYV | |
| | | DGVEVHNAKTKPREEQYGSTYRVVSVLTVL | |
| | | HQDWLNGKEYKCKVSNKALPAPIEKTISKA | |
| | | KGQPREPQVYTLPPSRDELTKNQVSLWCLV | |
| | | KGFYPSDIAVEWESNGQPENNYKTTPPVLD | |
| | | SDGSFFLYSKLTVDKSRWQQGNVFSCSVMH | |
| | | EALHNHYTQKSLSLSPGKGGSHHHHHH | |
| | Hole: | EVQLVESGGGLVQPGGSLRLSCAASGYTFT | |
| | | NYGMNWVRQAPGKGLEWVGWINTYTGEPTY | |
| | | AADFKRRFTFSLDTSKSTAYLQMNSLRAED | |
| | | TAVYYCAKYPHYYGSSHWYFDVWGQGTLVT | |
| | | VSSASTKGPSVFPLAPSSKSTSGGTAALGC | |
| | | LVKDYFPEPVTVSWNSGALTSGVHTFPAVL | |
| | | QSSGLYSLSSVVTVPSSSLGTQTYICNVNH | |
| | | KPSNTKVDKKVEPKSCDKTHTCPPCPAPEL | |
| | | LGGPSVFLFPPKPKDTLMISRTPEVTCVVV | |
| | | DVSHEDPEVKFNWYVDGVEVHNAKTKPREE | |
| | | QYGSTYRVVSVLTVLHQDWLNGKEYKCKVS | |
| | | NKALPAPIEKTISKAKGQPREPQVYTLPPS | |
| | | RDELTKNQVSLSCAVKGFYPSDIAVEWESN | |
| | | GQPENNYKTTPPVLDSDGSFFLVSKLTVDK | |
| | | SRWQQGNVFSCSVMHEALHNHYTQKSLSLS | |
| | | PGKGGSGAWSHPQFEK | |
| | L: | DIQMTQSPSSLSASVGDRVTITCSASQDIS | |
| | | NYLNWYQQKPGKAPKVLIYFTSSLHSGVPS | |
| | | RFSGSGSGTDFTLTISSLQPEDFATYYCQQ | |
| | | YSTVPWTFGQGTKVEIKRTVAAPSVFIFPP | |
| | | SDEQLKSGTASVVCLLNNFYPREAKVQWKV | |
| | | DNALQSGNSQESVTEQDSKDSTYSLSSTLT | |
| | | LSKADYEKHKVYACEVTHQGLSSPVTKSFN | |
| | | RGEC | |
| FGF-3 | Knob: | AAGPGARLRRDAGGRGGVYEHLGGAPRRRK | |
| | | LYCATKYHLQLHPSGRVNGSLENSAYSILE | |
| | | ITAVEVGIVAIRGLFSGRYLAMNKRGRLYA | |
| | | SEHYSAECEFVERIHELGYNTYASRLYRTV | |
| | | SSTPGARRQPSAERLWYVSVNGKGRPRRGF | |
| | | KTRRTQKSSLFLPRVLDHRDHEMVRQLQSG | |
| | | LPRPPGKGVQPRRRRQKQSPDNLEPSHVQA | |
| | | SRLGSQLEASAHEPKSCDKTHTCPPCPAPE | |
| | | LLGGPSVFLFPPKPKDTLMISRTPEVTCVV | |
| | | VDVSHEDPEVKFNWYVDGVEVHNAKTKPRE | |
| | | EQYGSTYRVVSVLTVLHQDWLNGKEYKCKV | |
| | | SNKALPAPIEKTISKAKGQPREPQVYTLPP | |
| | | SRDELTKNQVSLWCLVKGFYPSDIAVEWES | |
| | | NGQPENNYKTTPPVLDSDGSFFLYSKLTVD | |
| | | KSRWQQGNVFSCSVMHEALHNHYTQKSLSL | |
| | | SPGKGGSHHHHHH | |
| | Hole: | EVQLVESGGGLVQPGGSLRLSCAASGYTFT | |
| | | NYGMNWVRQAPGKGLEWVGWINTYTGEPTY | |
| | | AADFKRRFTFSLDTSKSTAYLQMNSLRAED | |
| | | TAVYYCAKYPHYYGSSHWYFDVWGQGTLVT | |
| | | VSSASTKGPSVFPLAPSSKSTSGGTAALGC | |
| | | LVKDYFPEPVTVSWNSGALTSGVHTFPAVL | |
| | | QSSGLYSLSSVVTVPSSSLGTQTYICNVNH | |
| | | KPSNTKVDKKVEPKSCDKTHTCPPCPAPEL | |
| | | LGGPSVFLFPPKPKDTLMISRTPEVTCVVV | |
| | | DVSHEDPEVKFNWYVDGVEVHNAKTKPREE | |
| | | QYGSTYRVVSVLTVLHQDWLNGKEYKCKVS | |
| | | NKALPAPIEKTISKAKGQPREPQVYTLPPS | |
| | | RDELTKNQVSLSCAVKGFYPSDIAVEWESN | |
| | | GQPENNYKTTPPVLDSDGSFFLVSKLTVDK | |
| | | SRWQQGNVFSCSVMHEALHNHYTQKSLSLS | |
| | | PGKGGSGAWSHPQFEK | |
| | L: | DIQMTQSPSSLSASVGDRVTITCSASQDIS | |
| | | NYLNWYQQKPGKAPKVLIYFTSSLHSGVPS | |
| | | RFSGSGSGTDFTLTISSLQPEDFATYYCQQ | |
| | | YSTVPWTFGQGTKVEIKRTVAAPSVFIFPP | |
| | | SDEQLKSGTASVVCLLNNFYPREAKVQWKV | |
| | | DNALQSGNSQESVTEQDSKDSTYSLSSTLT | |
| | | LSKADYEKHKVYACEVTHQGLSSPVTKSFN | |
| | | RGEC | |
| FGF-4 | Knob: | APTAPNGTLEAELERRWESLVALSLARLPV | |
| | | AAQPKEAAVQSGAGDYLLGIKRLRRLYCNV | |
| | | GIGFHLQALPDGRIGGAHADTRDSLLELSP | |
| | | VERGVVSIFGVASRFFVAMSSKGKLYGSPF | |
| | | FTDECTFKEILLPNNYNAYESYKYPGMFIA | |
| | | LSKNGKTKKGNRVSPTMKVTHFLPRLEPKS | |
| | | CDKTHTCPPCPAPELLGGPSVFLFPPKPKD | |
| | | TLMISRTPEVTCVVVDVSHEDPEVKFNWYV | |
| | | DGVEVHNAKTKPREEQYGSTYRVVSVLTVL | |
| | | HQDWLNGKEYKCKVSNKALPAPIEKTISKA | |
| | | KGQPREPQVYTLPPSRDELTKNQVSLWCLV | |
| | | KGFYPSDIAVEWESNGQPENNYKTTPPVLD | |
| | | SDGSFFLYSKLTVDKSRWQQGNVFSCSVMH | |
| | | EALHNHYTQKSLSLSPGKGGSHHHHHH | |
| | Hole: | EVQLVESGGGLVQPGGSLRLSCAASGYTFT | |
| | | NYGMNWVRQAPGKGLEWVGWINTYTGEPTY | |
| | | AADFKRRFTFSLDTSKSTAYLQMNSLRAED | |
| | | TAVYYCAKYPHYYGSSHWYFDVWGQGTLVT | |
| | | VSSASTKGPSVFPLAPSSKSTSGGTAALGC | |
| | | LVKDYFPEPVTVSWNSGALTSGVHTFPAVL | |
| | | QSSGLYSLSSVVTVPSSSLGTQTYICNVNH | |
| | | KPSNTKVDKKVEPKSCDKTHTCPPCPAPEL | |
| | | LGGPSVFLFPPKPKDTLMISRTPEVTCVVV | |
| | | DVSHEDPEVKFNWYVDGVEVHNAKTKPREE | |
| | | QYGSTYRVVSVLTVLHQDWLNGKEYKCKVS | |
| | | NKALPAPIEKTISKAKGQPREPQVYTLPPS | |
| | | RDELTKNQVSLSCAVKGFYPSDIAVEWESN | |
| | | GQPENNYKTTPPVLDSDGSFFLVSKLTVDK | |
| | | SRWQQGNVFSCSVMHEALHNHYTQKSLSLS | |
| | | PGKGGSGAWSHPQFEK | |
| | L: | DIQMTQSPSSLSASVGDRVTITCSASQDIS | |
| | | NYLNWYQQKPGKAPKVLIYFTSSLHSGVPS | |
| | | RFSGSGSGTDFTLTISSLQPEDFATYYCQQ | |
| | | YSTVPWTFGQGTKVEIKRTVAAPSVFIFPP | |
| | | SDEQLKSGTASVVCLLNNFYPREAKVQWKV | |
| | | DNALQSGNSQESVTEQDSKDSTYSLSSTLT | |
| | | LSKADYEKHKVYACEVTHQGLSSPVTKSFN | |
| | | RGEC | |
| FGF-5 | Knob: | HGEKRLAPKGQPGPAATDRNPRGSSSRQSS | |
| | | SSAMSSSSASSSPAASLGSQGSGLEQSSFQ | |
| | | WSPSGRRTGSLYCRVGIGFHLQIYPDGKVN | |
| | | GSHEANMLSVLEIFAVSQGIVGIRGVFSNK | |
| | | FLAMSKKGKLHASAKFTDDCKFRERFQENS | |
| | | YNTYASAIHRTEKTGREWYVALNKRGKAKR | |
| | | GCSPRVKPQHISTHFLPRFKQSEQPELSFT | |
| | | VTVPEKKKPPSPIKPKIPLSAPRKNTNSVK | |
| | | YRLKFRFGEPKSCDKTHTCPPCPAPELLGG | |
| | | PSVFLFPPKPKDTLMISRTPEVTCVVVDVS | |
| | | HEDPEVKFNWYVDGVEVHNAKTKPREEQYG | |
| | | STYRVVSVLTVLHQDWLNGKEYKCKVSNKA | |
| | | LPAPIEKTISKAKGQPREPQVYTLPPSRDE | |
| | | LTKNQVSLWCLVKGFYPSDIAVEWESNGQP | |
| | | ENNYKTTPPVLDSDGSFFLYSKLTVDKSRW | |
| | | QQGNVFSCSVMHEALHNHYTQKSLSLSPGK | |
| | | GGSHHHHHH | |
| | Hole: | EVQLVESGGGLVQPGGSLRLSCAASGYTFT | |
| | | NYGMNWVRQAPGKGLEWVGWINTYTGEPTY | |
| | | AADFKRRFTFSLDTSKSTAYLQMNSLRAED | |
| | | TAVYYCAKYPHYYGSSHWYFDVWGQGTLVT | |
| | | VSSASTKGPSVFPLAPSSKSTSGGTAALGC | |
| | | LVKDYFPEPVTVSWNSGALTSGVHTFPAVL | |
| | | QSSGLYSLSSVVTVPSSSLGTQTYICNVNH | |
| | | KPSNTKVDKKVEPKSCDKTHTCPPCPAPEL | |
| | | LGGPSVFLFPPKPKDTLMISRTPEVTCVVV | |
| | | DVSHEDPEVKFNWYVDGVEVHNAKTKPREE | |
| | | QYGSTYRVVSVLTVLHQDWLNGKEYKCKVS | |
| | | NKALPAPIEKTISKAKGQPREPQVYTLPPS | |
| | | RDELTKNQVSLSCAVKGFYPSDIAVEWESN | |
| | | GQPENNYKTTPPVLDSDGSFFLVSKLTVDK | |
| | | SRWQQGNVFSCSVMHEALHNHYTQKSLSLS | |
| | | PGKGGSGAWSHPQFEK | |
| | L: | DIQMTQSPSSLSASVGDRVTITCSASQDIS | |
| | | NYLNWYQQKPGKAPKVLIYFTSSLHSGVPS | |
| | | RFSGSGSGTDFTLTISSLQPEDFATYYCQQ | |
| | | YSTVPWTFGQGTKVEIKRTVAAPSVFIFPP | |
| | | SDEQLKSGTASVVCLLNNFYPREAKVQWKV | |
| | | DNALQSGNSQESVTEQDSKDSTYSLSSTLT | |
| | | LSKADYEKHKVYACEVTHQGLSSPVTKSFN | |
| | | RGEC | |
| FGF-19 | Knob: | LAFSDAGPHVHYGWGDPIRLRHLYTSGPHG | |
| | | LSSCFLRIRADGVVDCARGQSAHSLLEIKA | |
| | | VALRTVAIKGVHSVRYLCMGADGKMQGLLQ | |
| | | YSEEDCAFEEEIRPDGYNVYRSEKHRLPVS | |
| | | LSSAKQRQLYKNRGFLPLSHELPMLPMVPE | |
| | | EPEDLRGHLESDMFSSPLETDSMDPFGLVT | |
| | | GLEAVRSPSFEKEPKSCDKTHTCPPCPAPE | |
| | | LLGGPSVFLFPPKPKDTLMISRTPEVTCVV | |
| | | VDVSHEDPEVKFNWYVDGVEVHNAKTKPRE | |
| | | EQYGSTYRVVSVLTVLHQDWLNGKEYKCKV | |
| | | SNKALPAPIEKTISKAKGQPREPQVYTLPP | |
| | | SRDELTKNQVSLWCLVKGFYPSDIAVEWES | |
| | | NGQPENNYKTTPPVLDSDGSFFLYSKLTVD | |
| | | KSRWQQGNVFSCSVMHEALHNHYTQKSLSL | |
| | | SPGKGGSHHHHHH | |
| | Hole: | EVQLVESGGGLVQPGGSLRLSCAASGYTFT | |
| | | NYGMNWVRQAPGKGLEWVGWINTYTGEPTY | |
| | | AADFKRRFTFSLDTSKSTAYLQMNSLRAED | |
| | | TAVYYCAKYPHYYGSSHWYFDVWGQGTLVT | |
| | | VSSASTKGPSVFPLAPSSKSTSGGTAALGC | |
| | | LVKDYFPEPVTVSWNSGALTSGVHTFPAVL | |
| | | QSSGLYSLSSVVTVPSSSLGTQTYICNVNH | |
| | | KPSNTKVDKKVEPKSCDKTHTCPPCPAPEL | |
| | | LGGPSVFLFPPKPKDTLMISRTPEVTCVVV | |
| | | DVSHEDPEVKFNWYVDGVEVHNAKTKPREE | |
| | | QYGSTYRVVSVLTVLHQDWLNGKEYKCKVS | |
| | | NKALPAPIEKTISKAKGQPREPQVYTLPPS | |
| | | RDELTKNQVSLSCAVKGFYPSDIAVEWESN | |
| | | GQPENNYKTTPPVLDSDGSFFLVSKLTVDK | |
| | | SRWQQGNVFSCSVMHEALHNHYTQKSLSLS | |
| | | PGKGGSGAWSHPQFEK | |
| | L: | DIQMTQSPSSLSASVGDRVTITCSASQDIS | |
| | | NYLNWYQQKPGKAPKVLIYFTSSLHSGVPS | |
| | | RFSGSGSGTDFTLTISSLQPEDFATYYCQQ | |
| | | YSTVPWTFGQGTKVEIKRTVAAPSVFIFPP | |
| | | SDEQLKSGTASVVCLLNNFYPREAKVQWKV | |
| | | DNALQSGNSQESVTEQDSKDSTYSLSSTLT | |
| | | LSKADYEKHKVYACEVTHQGLSSPVTKSFN | |
| | | RGEC | |
| FGF-21 | Knob: | HPIPDSSPLLQFGGQVRQRYLYTDDAQQTE | |
| | | AHLEIREDGTVGGAADQSPESLLQLKALKP | |
| | | GVIQILGVKTSRFLCQRPDGALYGSLHFDP | |
| | | EACSFRELLLEDGYNVYQSEAHGLPLHLPG | |
| | | NKSPHRDPAPRGPARFLPLPGLPPALPEPP | |
| | | GILAPQPPDVGSSDPLSMVGPSQGRSPSYA | |
| | | SEPKSCDKTHTCPPCPAPELLGGPSVFLFP | |
| | | PKPKDTLMISRTPEVTCVVVDVSHEDPEVK | |
| | | FNWYVDGVEVHNAKTKPREEQYGSTYRVVS | |
| | | VLTVLHQDWLNGKEYKCKVSNKALPAPIEK | |
| | | TISKAKGQPREPQVYTLPPSRDELTKNQVS | |
| | | LWCLVKGFYPSDIAVEWESNGQPENNYKTT | |
| | | PPVLDSDGSFFLYSKLTVDKSRWQQGNVFS | |
| | | CSVMHEALHNHYTQKSLSLSPGKGGSHHHH | |
| | | HH | |
| | Hole: | EVQLVESGGGLVQPGGSLRLSCAASGYTFT | |
| | | NYGMNWVRQAPGKGLEWVGWINTYTGEPTY | |
| | | AADFKRRFTFSLDTSKSTAYLQMNSLRAED | |
| | | TAVYYCAKYPHYYGSSHWYFDVWGQGTLVT | |
| | | VSSASTKGPSVFPLAPSSKSTSGGTAALGC | |
| | | LVKDYFPEPVTVSWNSGALTSGVHTFPAVL | |
| | | QSSGLYSLSSVVTVPSSSLGTQTYICNVNH | |
| | | KPSNTKVDKKVEPKSCDKTHTCPPCPAPEL | |
| | | LGGPSVFLFPPKPKDTLMISRTPEVTCVVV | |
| | | DVSHEDPEVKFNWYVDGVEVHNAKTKPREE | |
| | | QYGSTYRVVSVLTVLHQDWLNGKEYKCKVS | |
| | | NKALPAPIEKTISKAKGQPREPQVYTLPPS | |
| | | RDELTKNQVSLSCAVKGFYPSDIAVEWESN | |
| | | GQPENNYKTTPPVLDSDGSFFLVSKLTVDK | |
| | | SRWQQGNVFSCSVMHEALHNHYTQKSLSLS | |
| | | PGKGGSGAWSHPQFEK | |
| | L: | DIQMTQSPSSLSASVGDRVTITCSASQDIS | |
| | | NYLNWYQQKPGKAPKVLIYFTSSLHSGVPS | |
| | | RFSGSGSGTDFTLTISSLQPEDFATYYCQQ | |
| | | YSTVPWTFGQGTKVEIKRTVAAPSVFIFPP | |
| | | SDEQLKSGTASVVCLLNNFYPREAKVQWKV | |
| | | DNALQSGNSQESVTEQDSKDSTYSLSSTLT | |
| | | LSKADYEKHKVYACEVTHQGLSSPVTKSFN | |
| | | RGEC | |
| FGF-21 | Knob: | CGEGLFTCRSTNICISHAWVCDGVDDCEDN | |
| Avimer | | SDENNCSAPASEPPGSLCGADQFRCGNGSC | |
| Mimic | | VPRAWRCDGVDDCGDGSDEAPEICETPTCQ | |
| | | SNEFRCRSGRCIPQHWLCDGLNDCGDGSDE | |
| | | SQQCSAPASEPPGSLEPKSCDKTHTCPPCP | |
| | | APELLGGPSVFLFPPKPKDTLMISRTPEVT | |
| | | CVVVDVSHEDPEVKFNWYVDGVEVHNAKTK | |
| | | PREEQYGSTYRVVSVLTVLHQDWLNGKEYK | |
| | | CKVSNKALPAPIEKTISKAKGQPREPQVYT | |
| | | LPPSRDELTKNQVSLWCLVKGFYPSDIAVE | |
| | | WESNGQPENNYKTTPPVLDSDGSFFLYSKL | |
| | | TVDKSRWQQGNVFSCSVMHEALHNHYTQKS | |
| | | LSLSPGKGGSHHHHHH | |
| | Hole: | EVQLVESGGGLVQPGGSLRLSCAASGYTFT | |
| | | NYGMNWVRQAPGKGLEWVGWINTYTGEPTY | |
| | | AADFKRRFTFSLDTSKSTAYLQMNSLRAED | |
| | | TAVYYCAKYPHYYGSSHWYFDVWGQGTLVT | |
| | | VSSASTK | |
| | | GPSVFPLAPSSKSTSGGTAALGCLVKDYFP | |
| | | EPVTVSWNSGALTSGVHTFPAVLQSSGLYS | |
| | | LSSVVTVPSSSLGTQTYICNVNHKPSNTKV | |
| | | DKKVEPKSCDKTHTCPPCPAPELLGGPSVF | |
| | | LFPPKPKDTLMISRTPEVTCVVVDVSHEDP | |
| | | EVKFNWYVDGVEVHNAKTKPREEQYGSTYR | |
| | | VVSVLTVLHQDWLNGKEYKCKVSNKALPAP | |
| | | IEKTISKAKGQPREPQVYTLPPSRDELTKN | |
| | | QVSLSCAVKGFYPSDIAVEWESNGQPENNY | |
| | | KTTPPVLDSDGSFFLVSKLTVDKSRWQQGN | |
| | | VFSCSVMHEALHNHYTQKSLSLSPGKGGSG | |
| | | AWSHPQFEK | |
| | L: | DIQMTQSPSSLSASVGDRVTITCSASQDIS | |
| | | NYLNWYQQKPGKAPKVLIYFTSSLHSGVPS | |
| | | RFSGSGSGTDFTLTISSLQPEDFATYYCQQ | |
| | | YSTVPWTFGQGTKVEIKRTVAAPSVFIFPP | |
| | | SDEQLKSGTASVVCLLNNFYPREAKVQWKV | |
| | | DNALQSGNSQESVTEQDSKDSTYSLSSTLT | |
| | | LSKADYEKHKVYACEVTHQGLSSPVTKSFN | |
| | | RGEC | |
| FGF-23 | Knob: | YPNASPLLGSSWGGLIHLYTATARNSYHLQ | |
| | | IHKNGHVDGAPHQTIYSALMIRSEDAGFVV | |
| | | ITGVMSRRYLCMDFRGNIFGSHYFDPENCR | |
| | | FQHQTLENGYDVYHSPQYHFLVSLGRAKRA | |
| | | FLPGMNPPPYSQFLSRRNEIPLIHFNTPIP | |
| | | RRHTRSAEDDSERDPLNVLKPRARMTPAPA | |
| | | SCSQELPSAEDNSPMASDPLGVVRGGRVNT | |
| | | HAGGTGPEGCRPFAKFIEPKSCDKTHTCPP | |
| | | CPAPELLGGPSVFLFPPKPKDTLMISRTPE | |
| | | VTCVVVDVSHEDPEVKFNWYVDGVEVHNAK | |
| | | TKPREEQYGSTYRVVSVLTVLHQDWLNGKE | |
| | | YKCKVSNKALPAPIEKTISKAKGQPREPQV | |
| | | YTLPPSRDELTKNQVSLWCLVKGFYPSDIA | |
| | | VEWESNGQPENNYKTTPPVLDSDGSFFLYS | |
| | | KLTVDKSRWQQGNVFSCSVMHEALHNHYTQ | |
| | | KSLSLSPGKGGSHHHHHH | |
| | Hole: | EVQLVESGGGLVQPGGSLRLSCAASGYTFT | |
| | | NYGMNWVRQAPGKGLEWVGWINTYTGEPTY | |
| | | AADFKRRFTFSLDTSKSTAYLQMNSLRAED | |
| | | TAVYYCAKYPHYYGSSHWYFDVWGQGTLVT | |
| | | VSSASTKGPSVFPLAPSSKSTSGGTAALGC | |
| | | LVKDYFPEPVTVSWNSGALTSGVHTFPAVL | |
| | | QSSGLYSLSSVVTVPSSSLGTQTYICNVNH | |
| | | KPSNTKVDKKVEPKSCDKTHTCPPCPAPEL | |
| | | LGGPSVFLFPPKPKDTLMISRTPEVTCVVV | |
| | | DVSHEDPEVKFNWYVDGVEVHNAKTKPREE | |
| | | QYGSTYRVVSVLTVLHQDWLNGKEYKCKVS | |
| | | NKALPAPIEKTISKAKGQPREPQVYTLPPS | |
| | | RDELTKNQVSLSCAVKGFYPSDIAVEWESN | |
| | | GQPENNYKTTPPVLDSDGSFFLVSKLTVDK | |
| | | SRWQQGNVFSCSVMHEALHNHYTQKSLSLS | |
| | | PGKGGSGAWSHPQFEK | |
| | L: | DIQMTQSPSSLSASVGDRVTITCSASQDIS | |
| | | NYLNWYQQKPGKAPKVLIYFTSSLHSGVPS | |
| | | RFSGSGSGTDFTLTISSLQPEDFATYYCQQ | |
| | | YSTVPWTFGQGTKVEIKRTVAAPSVFIFPP | |
| | | SDEQLKSGTASVVCLLNNFYPREAKVQWKV | |
| | | DNALQSGNSQESVTEQDSKDSTYSLSSTLT | |
| | | LSKADYEKHKVYACEVTHQGLSSPVTKSFN | |
| | | RGEC | |
| KGF | Knob: | CNDMTPEQMATNVNCSSPERHTRSYDYMEG | |
| | | GDIRVRRLFCRTQWYLRIDKRGKVKGTQEM | |
| | | KNNYNIMEIRTVAVGIVAIKGVESEFYLAM | |
| | | NKEGKLYAKKECNEDCNFKELILENHYNTY | |
| | | ASAKWTHNGGEMFVALNQKGIPVRGKKTKK | |
| | | EQKTAHFLPMAITEPKSCDKTHTCPPCPAP | |
| | | ELLGGPSVFLFPPKPKDTLMISRTPEVTCV | |
| | | VVDVSHEDPEVKFNWYVDGVEVHNAKTKPR | |
| | | EEQYGSTYRVVSVLTVL | |
| | | HQDWLNGKEYKCKVSNKALPAPIEKTISKA | |
| | | KGQPREPQVYTLPPSRDELTKNQVSLWCLV | |
| | | KGFYPSDIAVEWESNGQPENNYKTTPPVLD | |
| | | SDGSFFLYSKLTVDKSRWQQGNVFSCSVMH | |
| | | EALHNHYTQKSLSLSPGKGGSHHHHHH | |
| | Hole: | EVQLVESGGGLVQPGGSLRLSCAASGYTFT | |
| | | NYGMNWVRQAPGKGLEWVGWINTYTGEPTY | |
| | | AADFKRRFTFSLDTSKSTAYLQMNSLRAED | |
| | | TAVYYCAKYPHYYGSSHWYFDVWGQGTLVT | |
| | | VSSASTKGPSVFPLAPSSKSTSGGTAALGC | |
| | | LVKDYFPEPVTVSWNSGALTSGVHTFPAVL | |
| | | QSSGLYSLSSVVTVPSSSLGTQTYICNVNH | |
| | | KPSNTKVDKKVEPKSCDKTHTCPPCPAPEL | |
| | | LGGPSVFLFPPKPKDTLMISRTPEVTCVVV | |
| | | DVSHEDPEVKFNWYVDGVEVHNAKTKPREE | |
| | | QYGSTYRVVSVLTVLHQDWLNGKEYKCKVS | |
| | | NKALPAPIEKTISKAKGQPREPQVYTLPPS | |
| | | RDELTKNQVSLSCAVKGFYPSDIAVEWESN | |
| | | GQPENNYKTTPPVLDSDGSFFLVSKLTVDK | |
| | | SRWQQGNVFSCSVMHEALHNHYTQKSLSLS | |
| | | PGKGGSGAWSHPQFEK | |
| | L: | DIQMTQSPSSLSASVGDRVTITCSASQDIS | |
| | | NYLNWYQQKPGKAPKVLIYFTSSLHSGVPS | |
| | | RFSGSGSGTDFTLTISSLQPEDFATYYCQQ | |
| | | YSTVPWTFGQGTKVEIKRTVAAPSVFIFPP | |
| | | SDEQLKSGTASVVCLLNNFYPREAKVQWKV | |
| | | DNALQSGNSQESVTEQDSKDSTYSLSSTLT | |
| | | LSKADYEKHKVYACEVTHQGLSSPVTKSFN | |
| | | RGEC | |
| VEGF | Knob: | APMAEGGGQNHHEVVKFMDVYQRSYCHPIE | |
| | | TLVDIFQEYPDEIEYIFKPSCVPLMRCGGC | |
| | | CNDEGLECVPTEESNITMQIMRIKPHQGQH | |
| | | IGEMSFLQHNKCECRPKKDRARQEKKSVRG | |
| | | KGKGQKRKRKKSRYKSWSVYVGARCCLMPW | |
| | | SLPGPHPCGPCSERRKHLFVQDPQTCKCSC | |
| | | KNTDSRCKARQLELNERTCRCDKPRREPKS | |
| | | CDKTHTCPPCPAPELLGGPSVFLFPPKPKD | |
| | | TLMISRTPEVTCVVVDVSHEDPEVKFNWYV | |
| | | DGVEVHNAKTKPREEQYGSTYRVVSVLTVL | |
| | | HQDWLNGKEYKCKVSNKALPAPIEKTISKA | |
| | | KGQPREPQVYTLPPSRDELTKNQVSLWCLV | |
| | | KGFYPSDIAVEWESNGQPENNYKTTPPVLD | |
| | | SDGSFFLYSKLTVDKSRWQQGNVFSCSVMH | |
| | | EALHNHYTQKSLSLSPGKGGSHHHHHH | |
| | Hole: | EVQLVESGGGLVQPGGSLRLSCAASGYTFT | |
| | | NYGMNWVRQAPGKGLEWVGWINTYTGEPTY | |
| | | AADFKRRFTFSLDTSKSTAYLQMNSLRAED | |
| | | TAVYYCAKYPHYYGSSHWYFDVWGQGTLVT | |
| | | VSSASTKGPSVFPLAPSSKSTSGGTAALGC | |
| | | LVKDYFPEPVTVSWNSGALTSGVHTFPAVL | |
| | | QSSGLYSLSSVVTVPSSSLGTQTYICNVNH | |
| | | KPSNTKVDKKVEPKSCDKTHTCPPCPAPEL | |
| | | LGGPSVFLFPPKPKDTLMISRTPEVTCVVV | |
| | | DVSHEDPEVKFNWYVDGVEVHNAKTKPREE | |
| | | QYGSTYRVVSVLTVLHQDWLNGKEYKCKVS | |
| | | NKALPAPIEKTISKAKGQPREPQVYTLPPS | |
| | | RDELTKNQVSLSCAVKGFYPSDIAVEWESN | |
| | | GQPENNYKTTPPVLDSDGSFFLVSKLTVDK | |
| | | SRWQQGNVFSCSVMHEALHNHYTQKSLSLS | |
| | | PGKGGSGAWSHPQFEK | |
| | L: | DIQMTQSPSSLSASVGDRVTITCSASQDIS | |
| | | NYLNWYQQKPGKAPKVLIYFTSSLHSGVPS | |
| | | RFSGSGSGTDFTLTISSLQPEDFATYYCQQ | |
| | | YSTVPWTFGQGTKVEIKRTVAAPSVFIFPP | |
| | | SDEQLKSGTASVVC | |
| | | LLNNFYPREAKVQWKVDNALQSGNSQESVT | |
| | | EQDSKDSTYSLSSTLTLSKADYEKHKVYAC | |
| | | EVTHQGLSSPVTKSFNRGEC | |
| PDGFαα | Knob: | SIEEAVPAVCKTRTVIYEIPRSQVDPTSAN | |
| | | FLIWPPCVEVKRCTGCCNTSSVKCQPSRVH | |
| | | HRSVKVAKVEYVRKKPKLKEVQVRLEEHLE | |
| | | CACATTSLNPDYREEDTGRPRESGKKRKRK | |
| | | RLKPTEPKSCDKTHTCPPCPAPELLGGPSV | |
| | | FLFPPKPKDTLMISRTPEVTCVVVDVSHED | |
| | | PEVKFNWYVDGVEVHNAKTKPREEQYGSTY | |
| | | RVVSVLTVLHQDWLNGKEYKCKVSNKALPA | |
| | | PIEKTISKAKGQPREPQVYTLPPSRDELTK | |
| | | NQVSLWCLVKGFYPSDIAVEWESNGQPENN | |
| | | YKTTPPVLDSDGSFFLYSKLTVDKSRWQQG | |
| | | NVFSCSVMHEALHNHYTQKSLSLSPGKGGS | |
| | | HHHHHH | |
| | Hole: | EVQLVESGGGLVQPGGSLRLSCAASGYTFT | |
| | | NYGMNWVRQAPGKGLEWVGWINTYTGEPTY | |
| | | AADFKRRFTFSLDTSKSTAYLQMNSLRAED | |
| | | TAVYYCAKYPHYYGSSHWYFDVWGQGTLVT | |
| | | VSSASTKGPSVFPLAPSSKSTSGGTAALGC | |
| | | LVKDYFPEPVTVSWNSGALTSGVHTFPAVL | |
| | | QSSGLYSLSSVVTVPSSSLGTQTYICNVNH | |
| | | KPSNTKVDKKVEPKSCDKTHTCPPCPAPEL | |
| | | LGGPSVFLFPPKPKDTLMISRTPEVTCVVV | |
| | | DVSHEDPEVKFNWYVDGVEVHNAKTKPREE | |
| | | QYGSTYRVVSVLTVLHQDWLNGKEYKCKVS | |
| | | NKALPAPIEKTISKAKGQPREPQVYTLPPS | |
| | | RDELTKNQVSLSCAVKGFYPSDIAVEWESN | |
| | | GQPENNYKTTPPVLDSDGSFFLVSKLTVDK | |
| | | SRWQQGNVFSCSVMHEALHNHYTQKSLSLS | |
| | | PGKGGSGAWSHPQFEK | |
| | L: | DIQMTQSPSSLSASVGDRVTITCSASQDIS | |
| | | NYLNWYQQKPGKAPKVLIYFTSSLHSGVPS | |
| | | RFSGSGSGTDFTLTISSLQPEDFATYYCQQ | |
| | | YSTVPWTFGQGTKVEIKRTVAAPSVFIFPP | |
| | | SDEQLKSGTASVVCLLNNFYPREAKVQWKV | |
| | | DNALQSGNSQESVTEQDSKDSTYSLSSTLT | |
| | | LSKADYEKHKVYACEVTHQGLSSPVTKSFN | |
| | | RGEC | |
| PDGFββ | Knob: | SLGSLTIAEPAMIAECKTRTEVFEISRRLI | |
| | | DRTNANFLVWPPCVEVQRCSGCCNNRNVQC | |
| | | RPTQVQLRPVQVRKIEIVRKKPIFKKATVT | |
| | | LEDHLACKCETVAAARPVTEPKSCDKTHTC | |
| | | PPCPAPELLGGPSVFLFPPKPKDTLMISRT | |
| | | PEVTCVVVDVSHEDPEVKFNWYVDGVEVHN | |
| | | AKTKPREEQYGSTYRVVSVLTVLHQDWLNG | |
| | | KEYKCKVSNKALPAPIEKTISKAKGQPREP | |
| | | QVYTLPPSRDELTKNQVSLWCLVKGFYPSD | |
| | | IAVEWESNGQPENNYKTTPPVLDSDGSFFL | |
| | | YSKLTVDKSRWQQGNVFSCSVMHEALHNHY | |
| | | TQKSLSLSPGKGGSHHHHHH | |
| | Hole: | EVQLVESGGGLVQPGGSLRLSCAASGYTFT | |
| | | NYGMNWVRQAPGKGLEWVGWINTYTGEPTY | |
| | | AADFKRRFTFSLDTSKSTAYLQMNSLRAED | |
| | | TAVYYCAKYPHYYGSSHWYFDVWGQGTLVT | |
| | | VSSASTKGPSVFPLAPSSKSTSGGTAALGC | |
| | | LVKDYFPEPVTVSWNSGALTSGVHTFPAVL | |
| | | QSSGLYSLSSVVTVPSSSLGTQTYICNVNH | |
| | | KPSNTKVDKKVEPKSCDKTHTCPPCPAPEL | |
| | | LGGPSVFLFPPKPKDTLMISRTPEVTCVVV | |
| | | DVSHEDPEVKFNWYVDGVEVHNAKTKPREE | |
| | | QYGSTYRVVSVLTVLHQDWLNGKEYKCKVS | |
| | | NKALPAPIEKTISKAKGQPREPQVYTLPPS | |
| | | RDELTKNQVSLSCAVKGFYPSDIAVEW | |
| | | ESNGQPENNYKTTPPVLDSDGSFFLVSKLT | |
| | | VDKSRWQQGNVFSCSVMHEALHNHYTQKSL | |
| | | SLSPGKGGSGAWSHPQFEK | |
| | L: | DIQMTQSPSSLSASVGDRVTITCSASQDIS | |
| | | NYLNWYQQKPGKAPKVLIYFTSSLHSGVPS | |
| | | RFSGSGSGTDFTLTISSLQPEDFATYYCQQ | |
| | | YSTVPWTFGQGTKVEIKRTVAAPSVFIFPP | |
| | | SDEQLKSGTASVVCLLNNFYPREAKVQWKV | |
| | | DNALQSGNSQESVTEQDSKDSTYSLSSTLT | |
| | | LSKADYEKHKVYACEVTHQGLSSPVTKSFN | |
| | | RGEC | |
| NGF | Knob: | SSSHPIFHRGEFSVCDSVSVWVGDKTTATD | |
| | | IKGKEVMVLGEVNINNSVFKQYFFETKCRD | |
| | | PNPVDSGCRGIDSKHWNSYCTTTHTFVKAL | |
| | | TMDGKQAAWRFIRIDTACVCVLSRKAVRRA | |
| | | EPKSCDKTHTCPPCPAPELLGGPSVFLFPP | |
| | | KPKDTLMISRTPEVTCVVVDVSHEDPEVKF | |
| | | NWYVDGVEVHNAKTKPREEQYGSTYRVVSV | |
| | | LTVLHQDWLNGKEYKCKVSNKALPAPIEKT | |
| | | ISKAKGQPREPQVYTLPPSRDELTKNQVSL | |
| | | WCLVKGFYPSDIAVEWESNGQPENNYKTTP | |
| | | PVLDSDGSFFLYSKLTVDKSRWQQGNVFSC | |
| | | SVMHEALHNHYTQKSLSLSPGKGGSHHHHH | |
| | | H | |
| | Hole: | EVQLVESGGGLVQPGGSLRLSCAASGYTFT | |
| | | NYGMNWVRQAPGKGLEWVGWINTYTGEPTY | |
| | | AADFKRRFTFSLDTSKSTAYLQMNSLRAED | |
| | | TAVYYCAKYPHYYGSSHWYFDVWGQGTLVT | |
| | | VSSASTKGPSVFPLAPSSKSTSGGTAALGC | |
| | | LVKDYFPEPVTVSWNSGALTSGVHTFPAVL | |
| | | QSSGLYSLSSVVTVPSSSLGTQTYICNVNH | |
| | | KPSNTKVDKKVEPKSCDKTHTCPPCPAPEL | |
| | | LGGPSVFLFPPKPKDTLMISRTPEVTCVVV | |
| | | DVSHEDPEVKFNWYVDGVEVHNAKTKPREE | |
| | | QYGSTYRVVSVLTVLHQDWLNGKEYKCKVS | |
| | | NKALPAPIEKTISKAKGQPREPQVYTLPPS | |
| | | RDELTKNQVSLSCAVKGFYPSDIAVEWESN | |
| | | GQPENNYKTTPPVLDSDGSFFLVSKLTVDK | |
| | | SRWQQGNVFSCSVMHEALHNHYTQKSLSLS | |
| | | PGKGGSGAWSHPQFEK | |
| | L: | DIQMTQSPSSLSASVGDRVTITCSASQDIS | |
| | | NYLNWYQQKPGKAPKVLIYFTSSLHSGVPS | |
| | | RFSGSGSGTDFTLTISSLQPEDFATYYCQQ | |
| | | YSTVPWTFGQGTKVEIKRTVAAPSVFIFPP | |
| | | SDEQLKSGTASVVCLLNNFYPREAKVQWKV | |
| | | DNALQSGNSQESVTEQDSKDSTYSLSSTLT | |
| | | LSKADYEKHKVYACEVTHQGLSSPVTKSFN | |
| | | RGEC | |
| NTF3 | Knob: | YAEHKSHRGEYSVCDSESLWVTDKSSAIDI | |
| | | RGHQVTVLGEIKTGNSPVKQYFYETRCKEA | |
| | | RPVKNGCRGIDDKHWNSQCKTSQTYVRALT | |
| | | SENNKLVGWRWIRIDTSCVCALSRKIGRTE | |
| | | PKSCDKTHTCPPCPAPELLGGPSVFLFPPK | |
| | | PKDTLMISRTPEVTCVVVDVSHEDPEVKFN | |
| | | WYVDGVEVHNAKTKPREEQYGSTYRVVSVL | |
| | | TVLHQDWLNGKEYKCKVSNKALPAPIEKTI | |
| | | SKAKGQPREPQVYTLPPSRDELTKNQVSLW | |
| | | CLVKGFYPSDIAVEWESNGQPENNYKTTPP | |
| | | VLDSDGSFFLYSKLTVDKSRWQQGNVFSCS | |
| | | VMHEALHNHYTQKSLSLSPGKGGSHHHHHH | |
| | Hole: | EVQLVESGGGLVQPGGSLRLSCAASGYTFT | |
| | | NYGMNWVRQAPGKGLEWVGWINTYTGEPTY | |
| | | AADFKRRFTFSLDTSKSTAYLQMNSLRAED | |
| | | TAVYYCAKYPHYYGSSHWYFDVWGQGTLVT | |
| | | VSSASTKGPSVFPLAPSSKSTSGGTAALGC | |
| | | LVKDYFPEPVTVSWNSGALTSGVHTFPAVL | |
| | | QSSGLYSLSSVVTVPSSSLGTQTYICNVNH | |
| | | KPSNT | |
| | | KVDKKVEPKSCDKTHTCPPCPAPELLGGPS | |
| | | VFLFPPKPKDTLMISRTPEVTCVVVDVSHE | |
| | | DPEVKFNWYVDGVEVHNAKTKPREEQYGST | |
| | | YRVVSVLTVLHQDWLNGKEYKCKVSNKALP | |
| | | APIEKTISKAKGQPREPQVYTLPPSRDELT | |
| | | KNQVSLSCAVKGFYPSDIAVEWESNGQPEN | |
| | | NYKTTPPVLDSDGSFFLVSKLTVDKSRWQQ | |
| | | GNVFSCSVMHEALHNHYTQKSLSLSPGKGG | |
| | | SGAWSHPQFEK | |
| | L: | DIQMTQSPSSLSASVGDRVTITCSASQDIS | |
| | | NYLNWYQQKPGKAPKVLIYFTSSLHSGVPS | |
| | | RFSGSGSGTDFTLTISSLQPEDFATYYCQQ | |
| | | YSTVPWTFGQGTKVEIKRTVAAPSVFIFPP | |
| | | SDEQLKSGTASVVCLLNNFYPREAKVQWKV | |
| | | DNALQSGNSQESVTEQDSKDSTYSLSSTLT | |
| | | LSKADYEKHKVYACEVTHQGLSSPVTKSFN | |
| | | RGEC | |
| NTF4 | Knob: | GVSETAPASRRGELAVCDAVSGWVTDRRTA | |
| | | VDLRGREVEVLGEVPAAGGSPLRQYFFETR | |
| | | CKADNAEEGGPGAGGGGCRGVDRRHWVSEC | |
| | | KAKQSYVRALTADAQGRVGWRWIRIDTACV | |
| | | CTLLSRTGRAEPKSCDKTHTCPPCPAPELL | |
| | | GGPSVFLFPPKPKDTLMISRTPEVTCVVVD | |
| | | VSHEDPEVKFNWYVDGVEVHNAKTKPREEQ | |
| | | YGSTYRVVSVLTVLHQDWLNGKEYKCKVSN | |
| | | KALPAPIEKTISKAKGQPREPQVYTLPPSR | |
| | | DELTKNQVSLWCLVKGFYPSDIAVEWESNG | |
| | | QPENNYKTTPPVLDSDGSFFLYSKLTVDKS | |
| | | RWQQGNVFSCSVMHEALHNHYTQKSLSLSP | |
| | | GKGGSHHHHHH | |
| | Hole: | EVQLVESGGGLVQPGGSLRLSCAASGYTFT | |
| | | NYGMNWVRQAPGKGLEWVGWINTYTGEPTY | |
| | | AADFKRRFTFSLDTSKSTAYLQMNSLRAED | |
| | | TAVYYCAKYPHYYGSSHWYFDVWGQGTLVT | |
| | | VSSASTKGPSVFPLAPSSKSTSGGTAALGC | |
| | | LVKDYFPEPVTVSWNSGALTSGVHTFPAVL | |
| | | QSSGLYSLSSVVTVPSSSLGTQTYICNVNH | |
| | | KPSNTKVDKKVEPKSCDKTHTCPPCPAPEL | |
| | | LGGPSVFLFPPKPKDTLMISRTPEVTCVVV | |
| | | DVSHEDPEVKFNWYVDGVEVHNAKTKPREE | |
| | | QYGSTYRVVSVLTVLHQDWLNGKEYKCKVS | |
| | | NKALPAPIEKTISKAKGQPREPQVYTLPPS | |
| | | RDELTKNQVSLSCAVKGFYPSDIAVEWESN | |
| | | GQPENNYKTTPPVLDSDGSFFLVSKLTVDK | |
| | | SRWQQGNVFSCSVMHEALHNHYTQKSLSLS | |
| | | PGKGGSGAWSHPQFEK | |
| | L: | DIQMTQSPSSLSASVGDRVTITCSASQDIS | |
| | | NYLNWYQQKPGKAPKVLIYFTSSLHSGVPS | |
| | | RFSGSGSGTDFTLTISSLQPEDFATYYCQQ | |
| | | YSTVPWTFGQGTKVEIKRTVAAPSVFIFPP | |
| | | SDEQLKSGTASVVCLLNNFYPREAKVQWKV | |
| | | DNALQSGNSQESVTEQDSKDSTYSLSSTLT | |
| | | LSKADYEKHKVYACEVTHQGLSSPVTKSFN | |
| | | RGEC | |
| BDNF | Knob: | HSDPARRGELSVCDSISEWVTAADKKTAVD | |
| | | MSGGTVTVLEKVPVSKGQLKQYFYETKCNP | |
| | | MGYTKEGCRGIDKRHWNSQCRTTQSYVRAL | |
| | | TMDSKKRIGWRFIRIDTSCVCTLTIKRGRE | |
| | | PKSCDKTHTCPPCPAPELLGGPSVFLFPPK | |
| | | PKDTLMISRTPEVTCVVVDVSHEDPEVKFN | |
| | | WYVDGVEVHNAKTKPREEQYGSTYRVVSVL | |
| | | TVLHQDWLNGKEYKCKVSNKALPAPIEKTI | |
| | | SKAKGQPREPQVYTLPPSRDELTKNQVSLW | |
| | | CLVKGFYPSDIAVEWESNGQPENNYKTTPP | |
| | | VLDSDGSFFLYSKLTVDKSRWQQGNVFSCS | |
| | | VMHEALHNHYTQKSLSLSPGKGGSHHHHHH | |
| | Hole: | EVQLVESGGGLVQPGGSLRLSCAASGYTFT | |
| | | NYGMNWVRQAPGKGLEWVGWINTYTGEPTY | |
| | | AADFKRRFTFSLDTSKSTAYLQMNSLRAED | |
| | | TAVYYCAKYPHYYGSSHWYFDVWGQGTLVT | |
| | | VSSASTKGPSVFPLAPSSKSTSGGTAALGC | |
| | | LVKDYFPEPVTVSWNSGALTSGVHTFPAVL | |
| | | QSSGLYSLSSVVTVPSSSLGTQTYICNVNH | |
| | | KPSNTKVDKKVEPKSCDKTHTCPPCPAPEL | |
| | | LGGPSVFLFPPKPKDTLMISRTPEVTCVVV | |
| | | DVSHEDPEVKFNWYVDGVEVHNAKTKPREE | |
| | | QYGSTYRVVSVLTVLHQDWLNGKEYKCKVS | |
| | | NKALPAPIEKTISKAKGQPREPQVYTLPPS | |
| | | RDELTKNQVSLSCAVKGFYPSDIAVEWESN | |
| | | GQPENNYKTTPPVLDSDGSFFLVSKLTVDK | |
| | | SRWQQGNVFSCSVMHEALHNHYTQKSLSLS | |
| | | PGKGGSGAWSHPQFEK | |
| | L: | DIQMTQSPSSLSASVGDRVTITCSASQDIS | |
| | | NYLNWYQQKPGKAPKVLIYFTSSLHSGVPS | |
| | | RFSGSGSGTDFTLTISSLQPEDFATYYCQQ | |
| | | YSTVPWTFGQGTKVEIKRTVAAPSVFIFPP | |
| | | SDEQLKSGTASVVCLLNNFYPREAKVQWKV | |
| | | DNALQSGNSQESVTEQDSKDSTYSLSSTLT | |
| | | LSKADYEKHKVYACEVTHQGLSSPVTKSFN | |
| | | RGEC | |
| TGFβ1 | Knob: | ALDTNYCFSSTEKNCCVRQLYIDFRKDLGW | |
| | | KWIHEPKGYHANFCLGPCPYIWSLDTQYSK | |
| | | VLALYNQHNPGASAAPCCVPQALEPLPIVY | |
| | | YVGRKPKVEQLSNMIVRSCKCSEPKSCDKT | |
| | | HTCPPCPAPELLGGPSVFLFPPKPKDTLMI | |
| | | SRTPEVTCVVVDVSHEDPEVKFNWYVDGVE | |
| | | VHNAKTKPREEQYGSTYRVVSVLTVLHQDW | |
| | | LNGKEYKCKVSNKALPAPIEKTISKAKGQP | |
| | | REPQVYTLPPSRDELTKNQVSLWCLVKGFY | |
| | | PSDIAVEWESNGQPENNYKTTPPVLDSDGS | |
| | | FFLYSKLTVDKSRWQQGNVFSCSVMHEALH | |
| | | NHYTQKSLSLSPGKGGSHHHHHH | |
| | Hole: | EVQLVESGGGLVQPGGSLRLSCAASGYTFT | |
| | | NYGMNWVRQAPGKGLEWVGWINTYTGEPTY | |
| | | AADFKRRFTFSLDTSKSTAYLQMNSLRAED | |
| | | TAVYYCAKYPHYYGSSHWYFDVWGQGTLVT | |
| | | VSSASTKGPSVFPLAPSSKSTSGGTAALGC | |
| | | LVKDYFPEPVTVSWNSGALTSGVHTFPAVL | |
| | | QSSGLYSLSSVVTVPSSSLGTQTYICNVNH | |
| | | KPSNTKVDKKVEPKSCDKTHTCPPCPAPEL | |
| | | LGGPSVFLFPPKPKDTLMISRTPEVTCVVV | |
| | | DVSHEDPEVKFNWYVDGVEVHNAKTKPREE | |
| | | QYGSTYRVVSVLTVLHQDWLNGKEYKCKVS | |
| | | NKALPAPIEKTISKAKGQPREPQVYTLPPS | |
| | | RDELTKNQVSLSCAVKGFYPSDIAVEWESN | |
| | | GQPENNYKTTPPVLDSDGSFFLVSKLTVDK | |
| | | SRWQQGNVFSCSVMHEALHNHYTQKSLSLS | |
| | | PGKGGSGAWSHPQFEK | |
| | L: | DIQMTQSPSSLSASVGDRVTITCSASQDIS | |
| | | NYLNWYQQKPGKAPKVLIYFTSSLHSGVPS | |
| | | RFSGSGSGTDFTLTISSLQPEDFATYYCQQ | |
| | | YSTVPWTFGQGTKVEIKRTVAAPSVFIFPP | |
| | | SDEQLKSGTASVVCLLNNFYPREAKVQWKV | |
| | | DNALQSGNSQESVTEQDSKDSTYSLSSTLT | |
| | | LSKADYEKHKVYACEVTHQGLSSPVTKSFN | |
| | | RGEC | |
| TGFβ2 | Knob: | ALDAAYCFRNVQDNCCLRPLYIDFKRDLGW | |
| | | KWIHEPKGYNANFCAGACPYLWSSDTQHSR | |
| | | VLSLYNTINPEASASPCCVSQDLEPLTILY | |
| | | YIGKTPKIEQLSNMIVKSCKCSEPKSCDKT | |
| | | HTCPPCPAPELLGGPSVFLFPPKPKDTLMI | |
| | | SRTPEVTCVVVDVSHEDPEVKFNWYVDGVE | |
| | | VHNAKTKPREEQYGSTYRVVSVLTVLHQDW | |
| | | LNGKEY | |
| | | KCKVSNKALPAPIEKTISKAKGQPREPQVY | |
| | | TLPPSRDELTKNQVSLWCLVKGFYPSDIAV | |
| | | EWESNGQPENNYKTTPPVLDSDGSFFLYSK | |
| | | LTVDKSRWQQGNVFSCSVMHEALHNHYTQK | |
| | | SLSLSPGKGGSHHHHHH | |
| | Hole: | EVQLVESGGGLVQPGGSLRLSCAASGYTFT | |
| | | NYGMNWVRQAPGKGLEWVGWINTYTGEPTY | |
| | | AADFKRRFTFSLDTSKSTAYLQMNSLRAED | |
| | | TAVYYCAKYPHYYGSSHWYFDVWGQGTLVT | |
| | | VSSASTKGPSVFPLAPSSKSTSGGTAALGC | |
| | | LVKDYFPEPVTVSWNSGALTSGVHTFPAVL | |
| | | QSSGLYSLSSVVTVPSSSLGTQTYICNVNH | |
| | | KPSNTKVDKKVEPKSCDKTHTCPPCPAPEL | |
| | | LGGPSVFLFPPKPKDTLMISRTPEVTCVVV | |
| | | DVSHEDPEVKFNWYVDGVEVHNAKTKPREE | |
| | | QYGSTYRVVSVLTVLHQDWLNGKEYKCKVS | |
| | | NKALPAPIEKTISKAKGQPREPQVYTLPPS | |
| | | RDELTKNQVSLSCAVKGFYPSDIAVEWESN | |
| | | GQPENNYKTTPPVLDSDGSFFLVSKLTVDK | |
| | | SRWQQGNVFSCSVMHEALHNHYTQKSLSLS | |
| | | PGKGGSGAWSHPQFEK | |
| | L: | DIQMTQSPSSLSASVGDRVTITCSASQDIS | |
| | | NYLNWYQQKPGKAPKVLIYFTSSLHSGVPS | |
| | | RFSGSGSGTDFTLTISSLQPEDFATYYCQQ | |
| | | YSTVPWTFGQGTKVEIKRTVAAPSVFIFPP | |
| | | SDEQLKSGTASVVCLLNNFYPREAKVQWKV | |
| | | DNALQSGNSQESVTEQDSKDSTYSLSSTLT | |
| | | LSKADYEKHKVYACEVTHQGLSSPVTKSFN | |
| | | RGEC | |
| HGF β | Knob: | VVNGIPTRTNIGWMVSLRYRNKHICGGSLI | |
| chain | | KESWVLTARQCFPSRDLKDYEAWLGIHDVH | |
| | | GRGDEKCKQVLNVSQLVYGPEGSDLVLMKL | |
| | | ARPAVLDDFVSTIDLPNYGCTIPEKTSCSV | |
| | | YGWGYTGLINYDGLLRVAHLYIMGNEKCSQ | |
| | | HHRGKVTLNESEICAGAEKIGSGPCEGDYG | |
| | | GPLVCEQHKMRMVLGVIVPGRGCAIPNRPG | |
| | | IFVRVAYYAKWIHKIILTYKVPQSEPKSCD | |
| | | KTHTCPPCPAPELLGGPSVFLFPPKPKDTL | |
| | | MISRTPEVTCVVVDVSHEDPEVKFNWYVDG | |
| | | VEVHNAKTKPREEQYGSTYRVVSVLTVLHQ | |
| | | DWLNGKEYKCKVSNKALPAPIEKTISKAKG | |
| | | QPREPQVYTLPPSRDELTKNQVSLWCLVKG | |
| | | FYPSDIAVEWESNGQPENNYKTTPPVLDSD | |
| | | GSFFLYSKLTVDKSRWQQGNVFSCSVMHEA | |
| | | LHNHYTQKSLSLSPGKGGSHHHHHH | |
| | Hole: | EVQLVESGGGLVQPGGSLRLSCAASGYTFT | |
| | | NYGMNWVRQAPGKGLEWVGWINTYTGEPTY | |
| | | AADFKRRFTFSLDTSKSTAYLQMNSLRAED | |
| | | TAVYYCAKYPHYYGSSHWYFDVWGQGTLVT | |
| | | VSSASTKGPSVFPLAPSSKSTSGGTAALGC | |
| | | LVKDYFPEPVTVSWNSGALTSGVHTFPAVL | |
| | | QSSGLYSLSSVVTVPSSSLGTQTYICNVNH | |
| | | KPSNTKVDKKVEPKSCDKTHTCPPCPAPEL | |
| | | LGGPSVFLFPPKPKDTLMISRTPEVTCVVV | |
| | | DVSHEDPEVKFNWYVDGVEVHNAKTKPREE | |
| | | QYGSTYRVVSVLTVLHQDWLNGKEYKCKVS | |
| | | NKALPAPIEKTISKAKGQPREPQVYTLPPS | |
| | | RDELTKNQVSLSCAVKGFYPSDIAVEWESN | |
| | | GQPENNYKTTPPVLDSDGSFFLVSKLTVDK | |
| | | SRWQQGNVFSCSVMHEALHNHYTQKSLSLS | |
| | | PGKGGSGAWSHPQFEK | |
| | L: | DIQMTQSPSSLSASVGDRVTITCSASQDIS | |
| | | NYLNWYQQKPGKAPKVLIYFTSSLHSGVPS | |
| | | RFSGSGSGTDFTLTISSLQPEDFATYYCQQ | |
| | | YSTVPWTFGQGTKVEIKRTVAAPSVFIFPP | |
| | | SDEQLKSGTASVVCLLNNFYPREAKVQWKV | |
| | | DNALQSGNSQESVTEQDSKDSTYSLSSTLT | |
| | | LSKADYEKHKVYACEVTHQGLSSPVTKSFN | |
| | | RGEC | |

### Example 12: Methods for Example 11

[0251] Cell culture of THP-1s: THP-1 cells are cultured between 0.3×10⁶-1×10⁶ cells/mL in RPMI-1640 supplemented with 10% FBS and 1% Pen/Strep at 37 C and 5% CO2 according to supplier recommendations (ATCC).

[0252] Flow cytometry: Cells are either harvested directly (if in suspension) or by PBS wash followed by trypsinization for 5 mins with 0.25% trypsin-EDTA. Samples are spun at 1000×g for 5 mins, then washed with PBS 3× before quantifying fluorescence on a CytoFLEX cytomer (Beckman Coulter).

[0253] KineTAC expression: 30 mL Expi293 cells are transfected with 10 μg of each plasmid using an Expifectamine 293 Transfection kit (ThermoScientific) according to manufacturer specifications. Plasmids are as follows: 1) knob-kine pFUSE, 2) protein of interest (POI) binding heavy chain-hole pFUSE, 3) POI binding LC pFuse. 3 days post transfection, cells are harvested by centrifugation at 4000×g for 20 mins before filtration through a 0.22 m PES filter. 5 mM imidazole is then added to the media along with 500 μL slurry Hi-Bind Ni QR Agarose Beads (BioVision). The resin is incubated at 4° C. in the media for 1 hr, then collected by gravity column. 3×4 column volume (CV) washes with 20 mM imidazole in PBS are conducted before eluting in 2 CV 300 mM imidazole in PBS twice. Bispecifics are then concentrated and resuspended in 20% glycerol before being analyzed, aliquoted and flash frozen at −80° C. for dosing experiments.

[0254] VEGF chemical conjugation with pHrodo: 5 μM biotinylated VEGF165 (Acro Biosystems) is resuspended in PBS 0.1M sodium bicarbonate. pHrodo NHS-ester (ThermoScientific) is resuspended in PBS with 10% DMSO, then added at 25 μM. After reacting in the dark at 25° C. for 1 hr, the reaction is quenched with 500× molar excess glycine pH 8 for an additional 1 hr at room temperature in the dark. Zeba Spin Desalting Columns (ThermoScientific) with a 7 KDa MWCO is used according to manufacturer specifications to remove excess dye and glycine. Final protein is resuspended in PBS and analyzed for labeling efficiency by spectrophotometry or MS.

[0255] General flow soluble ligand uptake protocol: 50,000-5,000,000 relevant cells (THP-1s, HeLa, MDA-MB-231, Jurkat, Daudi, etc) are incubated at 4-37° C. in 100-1000 μL conditioned media containing control compounds or bispecifics and protein of interest. Biotin-streptavidin dye linked VEGF or chemically conjugated VEGF-dye was diluted at 0.05-200 nM in RPMI-1640. Bispecifics are then added to conjugated VEGF for a final concentration of 0.05-500 nM bispecific and 0.05-500 nM VEGF conjugate. The mixture is then immediately dosed onto cells and allowed to incubate for 0.5-72 hrs before harvesting by centrifugation at 1000×g, washing 3× with PBS, and performing flow cytometry. Plots are gated for live and singlet cells and MFI and the relevant fluorescence channel was used to quantify efficiency of the KineTAC.

### Example 13: Additional Constructs

[0256] This example described additional constructs to be made and tested as described in Example 14.

| | | Seq |
|---|---|---|
| Construct | | ID |
| Name | Construct Sequence | No |
| IL12A | Knob: | |
| | RNLPVATPDPGMFPCLHHSQNLLRAVSNMLQKARQTLEFYPCTSE | |
| | EIDHEDITKDKTSTVEACLPLELTKNESCLNSRETSFITNGSCLASR | |
| | KTSFMMALCLSSIYEDLKMYQVEFKTMNAKLLMDPKRQIFLDQN | |
| | MLAVIDELMQALNFNSETVPQKSSLEEPDFYKTKIKLCILLHAFRIR | |
| | AVTIDRVMSYLNASEPKSCDKTHTCPPCPAPELLGGPSVFLFPPKP | |
| | KDTLMISRTPEVTCVVVDVSHEDPEVKFNWYVDGVEVHNAKTKP | |
| | REEQYGSTYRVVSVLTVLHQDWLNGKEYKCKVSNKALPAPIEKTI | |
| | SKAKGQPREPQVYTLPPSRDELTKNQVSLWCLVKGFYPSDIAVEW | |
| | ESNGQPENNYKTTPPVLDSDGSFFLYSKLTVDKSRWQQGNVFSCS | |
| | VMHEALHNHYTQKSLSLSPGKGGSHHHHHH | |
| IL12B | Knob: | |
| | IWELKKDVYVVELDWYPDAPGEMVVLTCDTPEEDGITWTLDQSS | |
| | EVLGSGKTLTIQVKEFGDAGQYTCHKGGEVLSHSLLLLHKKEDGI | |
| | WSTDILKDQKEPKNKTFLRCEAKNYSGRFTCWWLTTISTDLTFSV | |
| | KSSRGSSDPQGVTCGAATLSAERVRGDNKEYEYSVECQEDSACPA | |
| | AEESLPIEVMVDAVHKLKYENYTSSFFIRDIIKPDPPKNLQLKPLKN | |
| | SRQVEVSWEYPDTWSTPHSYFSLTFCVQVQGKSKREKKDRVFTD | |
| | KTSATVICRKNASISVRAQDRYYSSSWSEWASVPCSEPKSCDKTH | |
| | TCPPCPAPELLGGPSVFLFPPKPKDTLMISRTPEVTCVVVDVSHEDP | |
| | EVKFNWYVDGVEVHNAKTKPREEQYGSTYRVVSVLTVLHQDWL | |
| | NGKEYKCKVSNKALPAPIEKTISKAKGQPREPQVYTLPPSRDELTK | |
| | NQVSLWCLVKGFYPSDIAVEWESNGQPENNYKTTPPVLDSDGSFF | |
| | LYSKLTVDKSRWQQGNVFSCSVMHEALHNHYTQKSLSLSPGKGG | |
| | SHHHHHH | |
| IL28B | Knob: | |
| | VPVARLRGALPDARGCHIAQFKSLSPQELQAFKRAKDALEESLLL | |
| | KDCKCRSRLFPRTWDLRQLQVRERPVALEAELALTLKVLEATADT | |
| | DPALGDVLDQPLHTLHHILSQLRACIQPQPTAGPRTRGRLHHWLH | |
| | RLQEAPKKESPGCLEASVTFNLFRLLTRDLNCVASGDLCVEPKSC | |
| | DKTHTCPPCPAPELLGGPSVFLFPPKPKDTLMISRTPEVTCVVVDV | |
| | SHEDPEVKFNWYVDGVEVHNAKTKPREEQYGSTYRVVSVLTVLH | |
| | QDWLNGKEYKCKVSNKALPAPIEKTISKAKGQPREPQVYTLPPSR | |
| | DELTKNQVSLWCLVKGFYPSDIAVEWESNGQPENNYKTTPPVLDS | |
| | DGSFFLYSKLTVDKSRWQQGNVFSCSVMHEALHNHYTQKSLSLS | |
| | PGKGGSHHHHHH | |
| IL29 | Knob: | |
| | GPVPTSKPTTTGKGCHIGRFKSLSPQELASFKKARDALEESLKLKN | |
| | WSCSSPVFPGNWDLRLLQVRERPVALEAELALTLKVLEAAAGPAL | |
| | EDVLDQPLHTLHHILSQLQACIQPQPTAGPRPRGRLHHWLHRLQE | |
| | APKKESAGCLEASVTFNLFRLLTRDLKYVADGNLCLRTSTHPESTE | |
| | PKSCDKTHTCPPCPAPELLGGPSVFLFPPKPKDTLMISRTPEVTCVV | |
| | VDVSHEDPEVKFNWYVDGVEVHNAKTKPREEQYGSTYRVVSVL | |
| | TVLHQDWLNGKEYKCKVSNKALPAPIEKTISKAKGQPREPQVYTL | |
| | PPSRDELTKNQVSLWCLVKGFYPSDIAVEWESNGQPENNYKTTPP | |
| | VLDSDGSFFLYSKLTVDKSRWQQGNVFSCSVMHEALHNHYTQKS | |
| | LSLSPGKGGSHHHHHH | |
| IL1A | Knob: | |
| | SAPFSFLSNVKYNFMRIIKYEFILNDALNQSIIRANDQYLTAAALHN | |
| | LDEAVKFDMGAYKSSKDDAKITVILRISKTQLYVTAQDEDQPVLL | |
| | KEMPEIPKTITGSETNLLFFWETHGTKNYFTSVAHPNLFIATKQDY | |
| | WVCLAGGPPSITDFQILENQAEPKSCDKTHTCPPCPAPELLGGPSV | |
| | FLFPPKPKDTLMISRTPEVTCVVVDVSHEDPEVKFNWYVDGVEVH | |
| | NAKTKPREEQYGSTYRVVSVLTVLHQDWLNGKEYKCKVSNKAL | |
| | PAPIEKTISKAKGQPREPQVYTLPPSRDELTKNQVSLWCLVKGFYP | |
| | SDIAVEWESNGQPENNYKTTPPVLDSDGSFFLYSKLTVDKSRWQQ | |
| | GNVFSCSVMHEALHNHYTQKSLSLSPGKGGSHHHHHH | |
| IL1B | Knob: | |
| | APVRSLNCTLRDSQQKSLVMSGPYELKALHLQGQDMEQQVVFSM | |
| | SFVQGEESNDKIPVALGLKEKNLYLSCVLKDDKPTLQLESVDPKN | |
| | YPKKKMEKRFVFNKIEINNKLEFESAQFPNWYISTSQAENMPVFLG | |
| | GTKGGQDITDFTMQFVSSEPKSCDKTHTCPPCPAPELLGGPSVFLF | |
| | PPKPKDTLMISRTPEVTCVVVDVSHEDPEVKFNWYVDGVEVHNA | |
| | KTKPREEQYGSTYRVVSVLTVLHQDWLNGKEYKCKVSNKALPAP | |
| | IEKTISKAKGQPREPQVYTLPPSRDELTKNQVSLWCLVKGFYPSDI | |
| | AVEWESNGQPENNYKTTPPVLDSDGSFFLYSKLTVDKSRWQQGN | |
| | VFSCSVMHEALHNHYTQKSLSLSPGKGGSHHHHHH | |
| IL1RN | Knob: | |
| | RPSGRKSSKMQAFRIWDVNQKTFYLRNNQLVAGYLQGPNVNLEE | |
| | KIDVVPIEPHALFLGIHGGKMCLSCVKSGDETRLQLEAVNITDLSE | |
| | NRKQDKRFAFIRSDSGPTTSFESAACPGWFLCTAMEADQPVSLTN | |
| | MPDEGVMVTKFYFQEDEEPKSCDKTHTCPPCPAPELLGGPSVFLF | |
| | PPKPKDTLMISRTPEVTCVVVDVSHEDPEVKFNWYVDGVEVHNA | |
| | KTKPREEQYGSTYRVVSVLTVLHQDWLNGKEYKCKVSNKALPAP | |
| | IEKTISKAKGQPREPQVYTLPPSRDELTKNQVSLWCLVKGFYPSDI | |
| | AVEWESNGQPENNYKTTPPVLDSDGSFFLYSKLTVDKSRWQQGN | |
| | VFSCSVMHEALHNHYTQKSLSLSPGKGGSHHHHHH | |
| IL36B | Knob: | |
| | REAAPKSYAIRDSRQMVWVLSGNSLIAAPLSRSIKPVTLHLIACRD | |
| | TEFSDKEKGNMVYLGIKGKDLCLFCAEIQGKPTLQLKLQGSQDNI | |
| | GKDTCWKLVGIHTCINLDVRESCFMGTLDQWGIGVGRKKWKSSF | |
| | QHHHLRKKDKDFSSMRTNIGMPGRMEPKSCDKTHTCPPCPAPELL | |
| | GGPSVFLFPPKPKDTLMISRTPEVTCVVVDVSHEDPEVKFNWYVD | |
| | GVEVHNAKTKPREEQYGSTYRVVSVLTVLHQDWLNGKEYKCKV | |
| | SNKALPAPIEKTISKAKGQPREPQVYTLPPSRDELTKNQVSLWCLV | |
| | KGFYPSDIAVEWESNGQPENNYKTTPPVLDSDGSFFLYSKLTVDK | |
| | SRWQQGNVFSCSVMHEALHNHYTQKSLSLSPGKGGSHHHHHH | |
| IL36G | Knob: | |
| | SMCKPITGTINDLNQQVWTLQGQNLVAVPRSDSVTPVTVAVITCK | |
| | YPEALEQGRGDPIYLGIQNPEMCLYCEKVGEQPTLQLKEQKIMDL | |
| | YGQPEPVKPFLFYRAKTGRTSTLESVAFPDWFIASSKRDQPIILTSE | |
| | LGKSYNTAFELNINDEPKSCDKTHTCPPCPAPELLGGPSVFLFPPKP | |
| | KDTLMISRTPEVTCVVVDVSHEDPEVKFNWYVDGVEVHNAKTKP | |
| | REEQYGSTYRVVSVLTVLHQDWLNGKEYKCKVSNKALPAPIEKTI | |
| | SKAKGQPREPQVYTLPPSRDELTKNQVSLWCLVKGFYPSDIAVEW | |
| | ESNGQPENNYKTTPPVLDSDGSFFLYSKLTVDKSRWQQGNVFSCS | |
| | VMHEALHNHYTQKSLSLSPGKGGSHHHHHH | |
| CXCL4 | Knob: | |
| | EAEEDGDLQCLCVKTTSQVRPRHITSLEVIKAGPHCPTAQLIATLK | |
| | NGRKICLDLQAPLYKKIIKKLLESEPKSCDKTHTCPPCPAPELLGGP | |
| | SVFLFPPKPKDTLMISRTPEVTCVVVDVSHEDPEVKFNWYVDGVE | |
| | VHNAKTKPREEQYGSTYRVVSVLTVLHQDWLNGKEYKCKVSNK | |
| | ALPAPIEKTISKAKGQPREPQVYTLPPSRDELTKNQVSLWCLVKGF | |
| | YPSDIAVEWESNGQPENNYKTTPPVLDSDGSFFLYSKLTVDKSRW | |
| | QQGNVFSCSVMHEALHNHYTQKSLSLSPGKGGSHHHHHH | |
| CXCL10 | Knob: | |
| | VPLSRTVRCTCISISNQPVNPRSLEKLEIIPASQFCPRVEIIATMKKK | |
| | GEKRCLNPESKAIKNLLKAVSKERSKRSPEPKSCDKTHTCPPCPAP | |
| | ELLGGPSVFLFPPKPKDTLMISRTPEVTCVVVDVSHEDPEVKFNW | |
| | YVDGVEVHNAKTKPREEQYGSTYRVVSVLTVLHQDWLNGKEYK | |
| | CKVSNKALPAPIEKTISKAKGQPREPQVYTLPPSRDELTKNQVSLW | |
| | CLVKGFYPSDIAVEWESNGQPENNYKTTPPVLDSDGSFFLYSKLT | |
| | VDKSRWQQGNVFSCSVMHEALHNHYTQKSLSLSPGKGGSHHHH | |
| | HH | |
| CXCL14 | Knob: | |
| | SKCKCSRKGPKIRYSDVKKLEMKPKYPHCEEKMVIITTKSVSRYR | |
| | GQEHCLHPKLQSTKRFIKWYNAWNEKRRVYEEEPKSCDKTHTCP | |
| | PCPAPELLGGPSVFLFPPKPKDTLMISRTPEVTCVVVDVSHEDPEV | |
| | KFNWYVDGVEVHNAKTKPREEQYGSTYRVVSVLTVLHQDWLNG | |
| | KEYKCKVSNKALPAPIEKTISKAKGQPREPQVYTLPPSRDELTKNQ | |
| | VSLWCLVKGFYPSDIAVEWESNGQPENNYKTTPPVLDSDGSFFLY | |
| | SKLTVDKSRWQQGNVFSCSVMHEALHNHYTQKSLSLSPGKGGSH | |
| | HHHHH | |
| XCL2 | Knob: | |
| | VGSEVSHRRTCVSLTTQRLPVSRIKTYTITEGSLRAVIFITKRGLKV | |
| | CADPQATWVRDVVRSMDRKSNTRNNMIQTKPTGTQQSTNTAVTL | |
| | TGEPKSCDKTHTCPPCPAPELLGGPSVFLFPPKPKDTLMISRTPEVT | |
| | CVVVDVSHEDPEVKFNWYVDGVEVHNAKTKPREEQYGSTYRVV | |
| | SVLTVLHQDWLNGKEYKCKVSNKALPAPIEKTISKAKGQPREPQV | |
| | YTLPPSRDELTKNQVSLWCLVKGFYPSDIAVEWESNGQPENNYKT | |
| | TPPVLDSDGSFFLYSKLTVDKSRWQQGNVFSCSVMHEALHNHYT | |
| | QKSLSLSPGKGGSHHHHHH | |
| IFNA1 | Knob: | |
| | CDLPETHSLDNRRTLMLLAQMSRISPSSCLMDRHDFGFPQEEFDG | |
| | NQFQKAPAISVLHELIQQIFNLFTTKDSSAAWDEDLLDKFCTELYQ | |
| | QLNDLEACVMQEERVGETPLMNADSILAVKKYFRRITLYLTEKKY | |
| | SPCAWEVVRAEIMRSLSLSTNLQERLRRKEEPKSCDKTHTCPPCPA | |
| | PELLGGPSVFLFPPKPKDTLMISRTPEVTCVVVDVSHEDPEVKFNW | |
| | YVDGVEVHNAKTKPREEQYGSTYRVVSVLTVLHQDWLNGKEYK | |
| | CKVSNKALPAPIEKTISKAKGQPREPQVYTLPPSRDELTKNQVSLW | |
| | CLVKGFYPSDIAVEWESNGQPENNYKTTPPVLDSDGSFFLYSKLT | |
| | VDKSRWQQGNVFSCSVMHEALHNHYTQKSLSLSPGKGGSHHHH | |
| | HH | |
| IFNA2 | Knob: | |
| | CDLPQTHSLGSRRTLMLLAQMRKISLFSCLKDRHDFGFPQEEFGN | |
| | QFQKAETIPVLHEMIQQIFNLFSTKDSSAAWDETLLDKFYTELYQQ | |
| | LNDLEACVIQGVGVTETPLMKEDSILAVRKYFQRITLYLKEKKYSP | |
| | CAWEVVRAEIMRSFSLSTNLQESLRSKEEPKSCDKTHTCPPCPAPE | |
| | LLGGPSVFLFPPKPKDTLMISRTPEVTCVVVDVSHEDPEVKFNWY | |
| | VDGVEVHNAKTKPREEQYGSTYRVVSVLTVLHQDWLNGKEYKC | |
| | KVSNKALPAPIEKTISKAKGQPREPQVYTLPPSRDELTKNQVSLWC | |
| | LVKGFYPSDIAVEWESNGQPENNYKTTPPVLDSDGSFFLYSKLTV | |
| | DKSRWQQGNVFSCSVMHEALHNHYTQKSLSLSPGKGGSHHHHH | |
| | H | |
| IFNA4 | Knob: | |
| | CDLPQTHSLGNRRALILLAQMGRISHFSCLKDRHDFGFPEEEFDGH | |
| | QFQKAQAISVLHEMIQQTFNLFSTEDSSAAWEQSLLEKFSTELYQQ | |
| | LNDLEACVIQEVGVEETPLMNEDSILAVRKYFQRITLYLTEKKYSP | |
| | CAWEVVRAEIMRSLSFSTNLQKRLRRKDEPKSCDKTHTCPPCPAP | |
| | ELLGGPSVFLFPPKPKDTLMISRTPEVTCVVVDVSHEDPEVKFNW | |
| | YVDGVEVHNAKTKPREEQYGSTYRVVSVLTVLHQDWLNGKEYK | |
| | CKVSNKALPAPIEKTISKAKGQPREPQVYTLPPSRDELTKNQVSLW | |
| | CLVKGFYPSDIAVEWESNGQPENNYKTTPPVLDSDGSFFLYSKLT | |
| | VDKSRWQQGNVFSCSVMHEALHNHYTQKSLSLSPGKGGSHHHH | |
| | HH | |
| IFNA14 | Knob: | |
| | CNLSQTHSLNNRRTLMLMAQMRRISPFSCLKDRHDFEFPQEEFDG | |
| | NQFQKAQAISVLHEMMQQTFNLFSTKNSSAAWDETLLEKFYIELF | |
| | QQMNDLEACVIQEVGVEETPLMNEDSILAVKKYFQRITLYLMEKK | |
| | YSPCAWEVVRAEIMRSLSFSTNLQKRLRRKDEPKSCDKTHTCPPC | |
| | PAPELLGGPSVFLFPPKPKDTLMISRTPEVTCVVVDVSHEDPEVKF | |
| | NWYVDGVEVHNAKTKPREEQYGSTYRVVSVLTVLHQDWLNGKE | |
| | YKCKVSNKALPAPIEKTISKAKGQPREPQVYTLPPSRDELTKNQVS | |
| | LWCLVKGFYPSDIAVEWESNGQPENNYKTTPPVLDSDGSFFLYSK | |
| | LTVDKSRWQQGNVFSCSVMHEALHNHYTQKSLSLSPGKGGSHHH | |
| | HHH | |
| IFNA8 | Knob: | |
| | CDLPQTHSLGNRRALILLAQMRRISPFSCLKDRHDFEFPQEEFDDK | |
| | QFQKAQAISVLHEMIQQTFNLFSTKDSSAALDETLLDEFYIELDQQ | |
| | LNDLESCVMQEVGVIESPLMYEDSILAVRKYFQRITLYLTEKKYSS | |
| | CAWEVVRAEIMRSFSLSINLQKRLKSKEEPKSCDKTHTCPPCPAPE | |
| | LLGGPSVFLFPPKPKDTLMISRTPEVTCVVVDVSHEDPEVKENWY | |
| | VDGVEVHNAKTKPREEQYGSTYRVVSVLTVLHQDWLNGKEYKC | |
| | KVSNKALPAPIEKTISKAKGQPREPQVYTLPPSRDELTKNQVSLWC | |
| | LVKGFYPSDIAVEWESNGQPENNYKTTPPVLDSDGSFFLYSKLTV | |
| | DKSRWQQGNVFSCSVMHEALHNHYTQKSLSLSPGKGGSHHHHH | |
| | H | |
| IFNA7 | Knob: | |
| | CDLPQTHSLRNRRALILLAQMGRISPFSCLKDRHEFRFPEEEFDGH | |
| | QFQKTQAISVLHEMIQQTFNLFSTEDSSAAWEQSLLEKFSTELYQQ | |
| | LNDLEACVIQEVGVEETPLMNEDFILAVRKYFQRITLYLMEKKYSP | |
| | CAWEVVRAEIMRSFSFSTNLKKGLRRKDEPKSCDKTHTCPPCPAP | |
| | ELLGGPSVFLFPPKPKDTLMISRTPEVTCVVVDVSHEDPEVKFNW | |
| | YVDGVEVHNAKTKPREEQYGSTYRVVSVLTVLHQDWLNGKEYK | |
| | CKVSNKALPAPIEKTISKAKGQPREPQVYTLPPSRDELTKNQVSLW | |
| | CLVKGFYPSDIAVEWESNGQPENNYKTTPPVLDSDGSFFLYSKLT | |
| | VDKSRWQQGNVFSCSVMHEALHNHYTQKSLSLSPGKGGSHHHH | |
| | HH | |
| IFNA21 | Knob: | |
| | CDLPQTHSLGNRRALILLAQMGRISPFSCLKDRHDFGFPQEEFDGN | |
| | QFQKAQAISVLHEMIQQTFNLFSTKDSSATWEQSLLEKFSTELNQQ | |
| | LNDLEACVIQEVGVEETPLMNVDSILAVKKYFQRITLYLTEKKYSP | |
| | CAWEVVRAEIMRSFSLSKIFQERLRRKEEPKSCDKTHTCPPCPAPE | |
| | LLGGPSVFLFPPKPKDTLMISRTPEVTCVVVDVSHEDPEVKENWY | |
| | VDGVEVHNAKTKPREEQYGSTYRVVSVLTVLHQDWLNGKEYKC | |
| | KVSNKALPAPIEKTISKAKGQPREPQVYTLPPSRDELTKNQVSLWC | |
| | LVKGFYPSDIAVEWESNGQPENNYKTTPPVLDSDGSFFLYSKLTV | |
| | DKSRWQQGNVFSCSVMHEALHNHYTQKSLSLSPGKGGSHHHHH | |
| | H | |
| IFNA17 | Knob: | |
| | CDLPQTHSLGNRRALILLAQMGRISPFSCLKDRHDFGLPQEEFDGN | |
| | QFQKTQAISVLHEMIQQTFNLFSTEDSSAAWEQSLLEKFSTELYQQ | |
| | LNNLEACVIQEVGMEETPLMNEDSILAVRKYFQRITLYLTEKKYSP | |
| | CAWEVVRAEIMRSLSFSTNLQKILRRKDEPKSCDKTHTCPPCPAPE | |
| | LLGGPSVFLFPPKPKDTLMISRTPEVTCVVVDVSHEDPEVKENWY | |
| | VDGVEVHNAKTKPREEQYGSTYRVVSVLTVLHQDWLNGKEYKC | |
| | KVSNKALPAPIEKTISKAKGQPREPQVYTLPPSRDELTKNQVSLWC | |
| | LVKGFYPSDIAVEWESNGQPENNYKTTPPVLDSDGSFFLYSKLTV | |
| | DKSRWQQGNVFSCSVMHEALHNHYTQKSLSLSPGKGGSHHHHH | |
| | H | |
| IFNA5 | Knob: | |
| | LGCDLPQTHSLSNRRTLMIMAQMGRISPFSCLKDRHDFGFPQEEFD | |
| | GNQFQKAQAISVLHEMIQQTFNLFSTKDSSATWDETLLDKFYTEL | |
| | YQQLNDLEACMMQEVGVEDTPLMNVDSILTVRKYFQRITLYLTE | |
| | KKYSPCAWEVVRAEIMRSFSLSANLQERLRRKEEPKSCDKTHTCP | |
| | PCPAPELLGGPSVFLFPPKPKDTLMISRTPEVTCVVVDVSHEDPEV | |
| | KFNWYVDGVEVHNAKTKPREEQYGSTYRVVSVLTVLHQDWLNG | |
| | KEYKCKVSNKALPAPIEKTISKAKGQPREPQVYTLPPSRDELTKNQ | |
| | VSLWCLVKGFYPSDIAVEWESNGQPENNYKTTPPVLDSDGSFFLY | |
| | SKLTVDKSRWQQGNVFSCSVMHEALHNHYTQKSLSLSPGKGGSH | |
| | HHHHH | |
| IFNA6 | Knob: | |
| | SLDCDLPQTHSLGHRRTMMLLAQMRRISLFSCLKDRHDFRFPQEE | |
| | FDGNQFQKAEAISVLHEVIQQTFNLFSTKDSSVAWDERLLDKLYT | |
| | ELYQQLNDLEACVMQEVWVGGTPLMNEDSILAVRKYFQRITLYL | |
| | TEKKYSPCAWEVVRAEIMRSFSSSRNLQERLRRKEEPKSCDKTHT | |
| | CPPCPAPELLGGPSVFLFPPKPKDTLMISRTPEVTCVVVDVSHEDPE | |
| | VKFNWYVDGVEVHNAKTKPREEQYGSTYRVVSVLTVLHQDWLN | |
| | GKEYKCKVSNKALPAPIEKTISKAKGQPREPQVYTLPPSRDELTKN | |
| | QVSLWCLVKGFYPSDIAVEWESNGQPENNYKTTPPVLDSDGSFFL | |
| | YSKLTVDKSRWQQGNVFSCSVMHEALHNHYTQKSLSLSPGKGGS | |
| | HHHHHH | |
| IFNA10 | Knob: | |
| | CDLPQTHSLGNRRALILLGQMGRISPFSCLKDRHDFRIPQEEFDGN | |
| | QFQKAQAISVLHEMIQQTFNLFSTEDSSAAWEQSLLEKFSTELYQQ | |
| | LNDLEACVIQEVGVEETPLMNEDSILAVRKYFQRITLYLIERKYSP | |
| | CAWEVVRAEIMRSLSFSTNLQKRLRRKDEPKSCDKTHTCPPCPAP | |
| | ELLGGPSVFLFPPKPKDTLMISRTPEVTCVVVDVSHEDPEVKENW | |
| | YVDGVEVHNAKTKPREEQYGSTYRVVSVLTVLHQDWLNGKEYK | |
| | CKVSNKALPAPIEKTISKAKGQPREPQVYTLPPSRDELTKNQVSLW | |
| | CLVKGFYPSDIAVEWESNGQPENNYKTTPPVLDSDGSFFLYSKLT | |
| | VDKSRWQQGNVFSCSVMHEALHNHYTQKSLSLSPGKGGSHHHH | |
| | HH | |
| IFNA16 | Knob: | |
| | CDLPQTHSLGNRRALILLAQMGRISHFSCLKDRYDFGFPQEVEDG | |
| | NQFQKAQAISAFHEMIQQTFNLFSTKDSSAAWDETLLDKFYIELFQ | |
| | QLNDLEACVTQEVGVEEIALMNEDSILAVRKYFQRITLYLMGKKY | |
| | SPCAWEVVRAEIMRSFSFSTNLQKGLRRKDEPKSCDKTHTCPPCP | |
| | APELLGGPSVFLFPPKPKDTLMISRTPEVTCVVVDVSHEDPEVKEN | |
| | WYVDGVEVHNAKTKPREEQYGSTYRVVSVLTVLHQDWLNGKEY | |
| | KCKVSNKALPAPIEKTISKAKGQPREPQVYTLPPSRDELTKNQVSL | |
| | WCLVKGFYPSDIAVEWESNGQPENNYKTTPPVLDSDGSFFLYSKL | |
| | TVDKSRWQQGNVFSCSVMHEALHNHYTQKSLSLSPGKGGSHHH | |
| | HHH | |
| GDF15 | Knob: | |
| | ARARNGDHCPLGPGRCCRLHTVRASLEDLGWADWVLSPREVQV | |
| | TMCIGACPSQFRAANMHAQIKTSLHRLKPDTVPAPCCVPASYNPM | |
| | VLIQKTDTGVSLQTYDDLLAKDCHCIEPKSCDKTHTCPPCPAPELL | |
| | GGPSVFLFPPKPKDTLMISRTPEVTCVVVDVSHEDPEVKFNWYVD | |
| | GVEVHNAKTKPREEQYGSTYRVVSVLTVLHQDWLNGKEYKCKV | |
| | SNKALPAPIEKTISKAKGQPREPQVYTLPPSRDELTKNQVSLWCLV | |
| | KGFYPSDIAVEWESNGQPENNYKTTPPVLDSDGSFFLYSKLTVDK | |
| | SRWQQGNVFSCSVMHEALHNHYTQKSLSLSPGKGGSHHHHHH | |
| GDF2 | Knob: | |
| | SAGAGSHCQKTSLRVNFEDIGWDSWIIAPKEYEAYECKGGCFFPL | |
| | ADDVTPTKHAIVQTLVHLKFPTKVGKACCVPTKLSPISVLYKDDM | |
| | GVPTLKYHYEGMSVAECGCREPKSCDKTHTCPPCPAPELLGGPSV | |
| | FLFPPKPKDTLMISRTPEVTCVVVDVSHEDPEVKFNWYVDGVEVH | |
| | NAKTKPREEQYGSTYRVVSVLTVLHQDWLNGKEYKCKVSNKAL | |
| | PAPIEKTISKAKGQPREPQVYTLPPSRDELTKNQVSLWCLVKGFYP | |
| | SDIAVEWESNGQPENNYKTTPPVLDSDGSFFLYSKLTVDKSRWQQ | |
| | GNVFSCSVMHEALHNHYTQKSLSLSPGKGGSHHHHHH | |
| BMP10 | Knob: | |
| | NAKGNYCKRTPLYIDFKEIGWDSWIIAPPGYEAYECRGVCNYPLA | |
| | EHLTPTKHAIIQALVHLKNSQKASKACCVPTKLEPISILYLDKGVV | |
| | TYKFKYEGMAVSECGCREPKSCDKTHTCPPCPAPELLGGPSVFLFP | |
| | PKPKDTLMISRTPEVTCVVVDVSHEDPEVKFNWYVDGVEVHNAK | |
| | TKPREEQYGSTYRVVSVLTVLHQDWLNGKEYKCKVSNKALPAPI | |
| | EKTISKAKGQPREPQVYTLPPSRDELTKNQVSLWCLVKGFYPSDIA | |
| | VEWESNGQPENNYKTTPPVLDSDGSFFLYSKLTVDKSRWQQGNV | |
| | FSCSVMHEALHNHYTQKSLSLSPGKGGSHHHHHH | |
| INHA | Knob: | |
| | STPLMSWPWSPSALRLLQRPPEEPAAHANCHRVALNISFQELGWE | |
| | RWIVYPPSFIFHYCHGGCGLHIPPNLSLPVPGAPPTPAQPYSLLPGA | |
| | QPCCAALPGTMRPLHVRTTSDGGYSFKYETVPNLLTQHCACI | |
| | EPKSCDKTHTCPPCPAPELLGGPSVFLFPPKPKDTLMISRTPEVTCV | |
| | VVDVSHEDPEVKFNWYVDGVEVHNAKTKPREEQYGSTYRVVSV | |
| | LTVLHQDWLNGKEYKCKVSNKALPAPIEKTISKAKGQPREPQVYT | |
| | LPPSRDELTKNQVSLWCLVKGFYPSDIAVEWESNGQPENNYKTTP | |
| | PVLDSDGSFFLYSKLTVDKSRWQQGNVFSCSVMHEALHNHYTQK | |
| | SLSLSPGKGGSHHHHHH | |
| BMP3 | Knob: | |
| | QWIEPRNCARRYLKVDFADIGWSEWIISPKSFDAYYCSGACQFPM | |
| | PKSLKPSNHATIQSIVRAVGVVPGIPEPCCVPEKMSSLSILFFDENK | |
| | NVVLKVYPNMTVESCACREPKSCDKTHTCPPCPAPELLGGPSVFL | |
| | FPPKPKDTLMISRTPEVTCVVVDVSHEDPEVKFNWYVDGVEVHN | |
| | AKTKPREEQYGSTYRVVSVLTVLHQDWLNGKEYKCKVSNKALP | |
| | APIEKTISKAKGQPREPQVYTLPPSRDELTKNQVSLWCLVKGFYPS | |
| | DIAVEWESNGQPENNYKTTPPVLDSDGSFFLYSKLTVDKSRWQQG | |
| | NVFSCSVMHEALHNHYTQKSLSLSPGKGGSHHHHHH | |
| TRAIL (APO2L) | Knob: | |
| | TNELKQMQDKYSKSGIACFLKEDDSYWDPNDEESMNSPCWQVK | |
| | WQLRQLVRKMILRTSEETISTVQEKQQNISPLVRERGPQRVAAHIT | |
| | GTRGRSNTLSSPNSKNEKALGRKINSWESSRSGHSFLSNLHLRNGE | |
| | LVIHEKGFYYIYSQTYFRFQEEIKENTKNDKQMVQYIYKYTSYPDP | |
| | ILLMKSARNSCWSKDAEYGLYSIYQGGIFELKENDRIFVSVTNEHL | |
| | IDMDHEASFFGAFLVGEPKSCDKTHTCPPCPAPELLGGPSVFLFPP | |
| | KPKDTLMISRTPEVTCVVVDVSHEDPEVKFNWYVDGVEVHNAKT | |
| | KPREEQYGSTYRVVSVLTVLHQDWLNGKEYKCKVSNKALPAPIE | |
| | KTISKAKGQPREPQVYTLPPSRDELTKNQVSLWCLVKGFYPSDIAV | |
| | EWESNGQPENNYKTTPPVLDSDGSFFLYSKLTVDKSRWQQGNVF | |
| | SCSVMHEALHNHYTQKSLSLSPGKGGSHHHHHH | |
| TL1 (VEGI) | Knob: | |
| | LKGQEFAPSHQQVYAPLRADGDKPRAHLTVVRQTPTQHFKNQFP | |
| | ALHWEHELGLAFTKNRMNYTNKFLLIPESGDYFIYSQVTFRGMTS | |
| | ECSEIRQAGRPNKPDSITVVITKVTDSYPEPTQLLMGTKSVCEVGS | |
| | NWFQPIYLGAMESLQEGDKLMVNVSDISLVDYTKEDKTFFGAFLL | |
| | EPKSCDKTHTCPPCPAPELLGGPSVFLFPPKPKDTLMISRTPEVTCV | |
| | VVDVSHEDPEVKFNWYVDGVEVHNAKTKPREEQYGSTYRVVSV | |
| | LTVLHQDWLNGKEYKCKVSNKALPAPIEKTISKAKGQPREPQVYT | |
| | LPPSRDELTKNQVSLWCLVKGFYPSDIAVEWESNGQPENNYKTTP | |
| | PVLDSDGSFFLYSKLTVDKSRWQQGNVFSCSVMHEALHNHYTQK | |
| | SLSLSPGKGGSHHHHHH | |
| LTA (TNFB) | Knob: | |
| | LPGVGLTPSAAQTARQHPKMHLAHSTLKPAAHLIGDPSKQNSLLW | |
| | RANTDRAFLQDGFSLSNNSLLVPTSGIYFVYSQVVFSGKAYSPKAT | |
| | SSPLYLAHEVQLFSSQYPFHVPLLSSQKMVYPGLQEPWLHSMYHG | |
| | AAFQLTQGDQLSTHTDGIPHLVLSPSTVFFGAFALEPKSCDKTHTC | |
| | PPCPAPELLGGPSVFLFPPKPKDTLMISRTPEVTCVVVDVSHEDPE | |
| | VKFNWYVDGVEVHNAKTKPREEQYGSTYRVVSVLTVLHQDWLN | |
| | GKEYKCKVSNKALPAPIEKTISKAKGQPREPQVYTLPPSRDELTKN | |
| | QVSLWCLVKGFYPSDIAVEWESNGQPENNYKTTPPVLDSDGSFFL | |
| | YSKLTVDKSRWQQGNVFSCSVMHEALHNHYTQKSLSLSPGKGGS | |
| | HHHHHH | |
| BLYS (BAFF) | Knob: | |
| | AVQGPEETVTQDCLQLIADSETPTIQKGSYTFVPWLLSFKRGSALE | |
| | EKENKILVKETGYFFIYGQVLYTDKTYAMGHLIQRKKVHVFGDEL | |
| | SLVTLFRCIQNMPETLPNNSCYSAGIAKLEEGDELQLAIPRENAQIS | |
| | LDGDVTFFGALKLLEPKSCDKTHTCPPCPAPELLGGPSVFLFPPKP | |
| | KDTLMISRTPEVTCVVVDVSHEDPEVKFNWYVDGVEVHNAKTKP | |
| | REEQYGSTYRVVSVLTVLHQDWLNGKEYKCKVSNKALPAPIEKTI | |
| | SKAKGQPREPQVYTLPPSRDELTKNQVSLWCLVKGFYPSDIAVEW | |
| | ESNGQPENNYKTTPPVLDSDGSFFLYSKLTVDKSRWQQGNVFSCS | |
| | VMHEALHNHYTQKSLSLSPGKGGSHHHHHH | |
| APRIL | Knob: | |
| | AVLTQKQKKQHSVLHLVPINATSKDDSDVTEVMWQPALRRGRGL | |
| | QAQGYGVRIQDAGVYLLYSQVLFQDVTFEPKSCDKTHTCPPCPAP | |
| | ELLGGPSVFLFPPKPKDTLMISRTPEVTCVVVDVSHEDPEVKENW | |
| | YVDGVEVHNAKTKPREEQYGSTYRVVSVLTVLHQDWLNGKEYK | |
| | CKVSNKALPAPIEKTISKAKGQPREPQVYTLPPSRDELTKNQVSLW | |
| | CLVKGFYPSDIAVEWESNGQPENNYKTTPPVLDSDGSFFLYSKLT | |
| | VDKSRWQQGNVFSCSVMHEALHNHYTQKSLSLSPGKGGSHHHH | |
| | HH | |
| RANKL | Knob: | |
| | IRAEKAMVDGSWLDLAKRSKLEAQPFAHLTINATDIPSGSHKVSLS | |
| | SWYHDRGWAKISNMTFSNGKLIVNQDGFYYLYANICFRHHETSG | |
| | DLATEYLQLMVYVTKTSIKIPSSHTLMKGGSTKYWSGNSEFHFYSI | |
| | NVGGFFKLRSGEEISIEVSNPSLLDPDQDATYFGAFKVRDIDEPKSC | |
| | DKTHTCPPCPAPELLGGPSVFLFPPKPKDTLMISRTPEVTCVVVDV | |
| | SHEDPEVKFNWYVDGVEVHNAKTKPREEQYGSTYRVVSVLTVLH | |
| | QDWLNGKEYKCKVSNKALPAPIEKTISKAKGQPREPQVYTLPPSR | |
| | DELTKNQVSLWCLVKGFYPSDIAVEWESNGQPENNYKTTPPVLDS | |
| | DGSFFLYSKLTVDKSRWQQGNVFSCSVMHEALHNHYTQKSLSLS | |
| | PGKGGSHHHHHH | |
| CD40LG | Knob: | |
| | MQKGDQNPQIAAHVISEASSKTTSVLQWAEKGYYTMSNNLVTLE | |
| | NGKQLTVKRQGLYYIYAQVTFCSNREASSQAPFIASLCLKSPGRFE | |
| | RILLRAANTHSSAKPCGQQSIHLGGVFELQPGASVFVNVTDPSQVS | |
| | HGTGFTSFGLLKLEPKSCDKTHTCPPCPAPELLGGPSVFLFPPKPKD | |
| | TLMISRTPEVTCVVVDVSHEDPEVKFNWYVDGVEVHNAKTKPRE | |
| | EQYGSTYRVVSVLTVLHQDWLNGKEYKCKVSNKALPAPIEKTISK | |
| | AKGQPREPQVYTLPPSRDELTKNQVSLWCLVKGFYPSDIAVEWES | |
| | NGQPENNYKTTPPVLDSDGSFFLYSKLTVDKSRWQQGNVFSCSV | |
| | MHEALHNHYTQKSLSLSPGKGGSHHHHHH | |
| EDA | Knob: | |
| | SKSNEGADGPVKNKKKGKKAGPPGPNGPPGPPGPPGPQGPPGIPGI | |
| | PGIPGTTVMGPPGPPGPPGPQGPPGLQGPSGAADKAGTRENQPAV | |
| | VHLQGQGSAIQVKNDLSGGVLNDWSRITMNPKVFKLHPRSGELE | |
| | VLVDGTYFIYSQVEVYYINFTDFASYEVVVDEKPFLQCTRSIETGK | |
| | TNYNTCYTAGVCLLKARQKIAVKMVHADISINMSKHTTFFGAIRL | |
| | GEAPASEPKSCDKTHTCPPCPAPELLGGPSVFLFPPKPKDTLMISRT | |
| | PEVTCVVVDVSHEDPEVKFNWYVDGVEVHNAKTKPREEQYGST | |
| | YRVVSVLTVLHQDWLNGKEYKCKVSNKALPAPIEKTISKAKGQP | |
| | REPQVYTLPPSRDELTKNQVSLWCLVKGFYPSDIAVEWESNGQPE | |
| | NNYKTTPPVLDSDGSFFLYSKLTVDKSRWQQGNVFSCSVMHEAL | |
| | HNHYTQKSLSLSPGKGGSHHHHHH | |
| FASLG | Knob: | |
| | QIGHPSPPPEKKELRKVAHLTGKSNSRSMPLEWEDTYGIVLLSGVK | |
| | YKKGGLVINETGLYFVYSKVYFRGQSCNNLPLSHKVYMRNSKYP | |
| | QDLVMMEGKMMSYCTTGQMWARSSYLGAVENLTSADHLYVNV | |
| | SELSLVNFEESQTFFGLYKLEPKSCDKTHTCPPCPAPELLGGPSVFL | |
| | FPPKPKDTLMISRTPEVTCVVVDVSHEDPEVKFNWYVDGVEVHN | |
| | AKTKPREEQYGSTYRVVSVLTVLHQDWLNGKEYKCKVSNKALP | |
| | APIEKTISKAKGQPREPQVYTLPPSRDELTKNQVSLWCLVKGFYPS | |
| | DIAVEWESNGQPENNYKTTPPVLDSDGSFFLYSKLTVDKSRWQQG | |
| | NVFSCSVMHEALHNHYTQKSLSLSPGKGGSHHHHHH | |
| CD70 | Knob: | |
| | QRFAQAQQQLPLESLGWDVAELQLNHTGPQQDPRLYWQGGPAL | |
| | GRSFLHGPELDKGQLRIHRDGIYMVHIQVTLAICSSTTASRHHPTT | |
| | LAVGICSPASRSISLLRLSFHQGCTIASQRLTPLARGDTLCTNLTGT | |
| | LLPSRNTDETFFGVQWVRPEPKSCDKTHTCPPCPAPELLGGPSVFL | |
| | FPPKPKDTLMISRTPEVTCVVVDVSHEDPEVKFNWYVDGVEVHN | |
| | AKTKPREEQYGSTYRVVSVLTVLHQDWLNGKEYKCKVSNKALP | |
| | APIEKTISKAKGQPREPQVYTLPPSRDELTKNQVSLWCLVKGFYPS | |
| | DIAVEWESNGQPENNYKTTPPVLDSDGSFFLYSKLTVDKSRWQQG | |
| | NVFSCSVMHEALHNHYTQKSLSLSPGKGGSHHHHHH | |
| EPO | Knob: | |
| | APPRLICDSRVLERYLLEAKEAENITTGCAEHCSLNENITVPDTKV | |
| | NFYAWKRMEVGQQAVEVWQGLALLSEAVLRGQALLVNSSQPWE | |
| | PLQLHVDKAVSGLRSLTTLLRALGAQKEAISPPDAASAAPLRTITA | |
| | DTFRKLFRVYSNFLRGKLKLYTGEACRTGDREPKSCDKTHTCPPC | |
| | PAPELLGGPSVFLFPPKPKDTLMISRTPEVTCVVVDVSHEDPEVKF | |
| | NWYVDGVEVHNAKTKPREEQYGSTYRVVSVLTVLHQDWLNGKE | |
| | YKCKVSNKALPAPIEKTISKAKGQPREPQVYTLPPSRDELTKNQVS | |
| | LWCLVKGFYPSDIAVEWESNGQPENNYKTTPPVLDSDGSFFLYSK | |
| | LTVDKSRWQQGNVFSCSVMHEALHNHYTQKSLSLSPGKGGSHHH | |
| | HHH | |
| GH1 | Knob: | |
| | FPTIPLSRLFDNAMLRAHRLHQLAFDTYQEFEEAYIPKEQKYSFLQ | |
| | NPQTSLCFSESIPTPSNREETQQKSNLELLRISLLLIQSWLEPVQFLR | |
| | SVFANSLVYGASDSNVYDLLKDLEEGIQTLMGRLEDGSPRTGQIF | |
| | KQTYSKFDTNSHNDDALLKNYGLLYCFRKDMDKVETFLRIVQCR | |
| | SVEGSCGFEPKSCDKTHTCPPCPAPELLGGPSVFLFPPKPKDTLMIS | |
| | RTPEVTCVVVDVSHEDPEVKFNWYVDGVEVHNAKTKPREEQYGS | |
| | TYRVVSVLTVLHQDWLNGKEYKCKVSNKALPAPIEKTISKAKGQP | |
| | REPQVYTLPPSRDELTKNQVSLWCLVKGFYPSDIAVEWESNGQPE | |
| | NNYKTTPPVLDSDGSFFLYSKLTVDKSRWQQGNVFSCSVMHEAL | |
| | HNHYTQKSLSLSPGKGGSHHHHHH | |
| GH2 | Knob: | |
| | FPTIPLSRLFDNAMLRARRLYQLAYDTYQEFEEAYILKEQKYSFLQ | |
| | NPQTSLCFSESIPTPSNRVKTQQKSNLELLRISLLLIQSWLEPVQLLR | |
| | SVFANSLVYGASDSNVYRHLKDLEEGIQTLMWRLEDGSPRTGQIF | |
| | NQSYSKFDTKSHNDDALLKNYGLLYCFRKDMDKVETFLRIVQCR | |
| | SVEGSCGFEPKSCDKTHTCPPCPAPELLGGPSVFLFPPKPKDTLMIS | |
| | RTPEVTCVVVDVSHEDPEVKFNWYVDGVEVHNAKTKPREEQYGS | |
| | TYRVVSVLTVLHQDWLNGKEYKCKVSNKALPAPIEKTISKAKGQP | |
| | REPQVYTLPPSRDELTKNQVSLWCLVKGFYPSDIAVEWESNGQPE | |
| | NNYKTTPPVLDSDGSFFLYSKLTVDKSRWQQGNVFSCSVMHEAL | |
| | HNHYTQKSLSLSPGKGGSHHHHHH | |
| PRL | Knob: | |
| | LPICPGGAARCQVTLRDLFDRAVVLSHYIHNLSSEMFSEFDKRYTH | |
| | GRGFITKAINSCHTSSLATPEDKEQAQQMNQKDFLSLIVSILRSWN | |
| | EPLYHLVTEVRGMQEAPEAILSKAVEIEEQTKRLLEGMELIVSQVH | |
| | PETKENEIYPVWSGLPSLQMADEESRLSAYYNLLHCLRRDSHKID | |
| | NYLKLLKCRIIHNNNCEPKSCDKTHTCPPCPAPELLGGPSVFLFPPK | |
| | PKDTLMISRTPEVTCVVVDVSHEDPEVKFNWYVDGVEVHNAKTK | |
| | PREEQYGSTYRVVSVLTVLHQDWLNGKEYKCKVSNKALPAPIEK | |
| | TISKAKGQPREPQVYTLPPSRDELTKNQVSLWCLVKGFYPSDIAVE | |
| | WESNGQPENNYKTTPPVLDSDGSFFLYSKLTVDKSRWQQGNVFS | |
| | CSVMHEALHNHYTQKSLSLSPGKGGSHHHHHH | |
| CSF3 | Knob: | |
| | TPLGPASSLPQSFLLKCLEQVRKIQGDGAALQEKLVSECATYKLCH | |
| | PEELVLLGHSLGIPWAPLSSCPSQALQLAGCLSQLHSGLFLYQGLL | |
| | QALEGISPELGPTLDTLQLDVADFATTIWQQMEELGMAPALQPTQ | |
| | GAMPAFASAFQRRAGGVLVASHLQSFLEVSYRVLRHLAQPEPKSC | |
| | DKTHTCPPCPAPELLGGPSVFLFPPKPKDTLMISRTPEVTCVVVDV | |
| | SHEDPEVKFNWYVDGVEVHNAKTKPREEQYGSTYRVVSVLTVLH | |
| | QDWLNGKEYKCKVSNKALPAPIEKTISKAKGQPREPQVYTLPPSR | |
| | DELTKNQVSLWCLVKGFYPSDIAVEWESNGQPENNYKTTPPVLDS | |
| | DGSFFLYSKLTVDKSRWQQGNVFSCSVMHEALHNHYTQKSLSLS | |
| | PGKGGSHHHHHH | |
| LEP | Knob: | |
| | VPIQKVQDDTKTLIKTIVTRINDISHTQSVSSKQKVTGLDFIPGLHPI | |
| | LTLSKMDQTLAVYQQILTSMPSRNVIQISNDLENLRDLLHVLAFSK | |
| | SCHLPWASGLETLDSLGGVLEASGYSTEVVALSRLQGSLQDMLW | |
| | QLDLSPGCEPKSCDKTHTCPPCPAPELLGGPSVFLFPPKPKDTLMIS | |
| | RTPEVTCVVVDVSHEDPEVKFNWYVDGVEVHNAKTKPREEQYGS | |
| | TYRVVSVLTVLHQDWLNGKEYKCKVSNKALPAPIEKTISKAKGQP | |
| | REPQVYTLPPSRDELTKNQVSLWCLVKGFYPSDIAVEWESNGQPE | |
| | NNYKTTPPVLDSDGSFFLYSKLTVDKSRWQQGNVFSCSVMHEAL | |
| | HNHYTQKSLSLSPGKGGSHHHHHH | |
| CSF1 | Knob: | |
| | EEVSEYCSHMIGSGHLQSLQRLIDSQMETSCQITFEFVDQEQLKDP | |
| | VCYLKKAFLLVQDIMEDTMRFRDNTPNAIAIVQLQELSLRLKSCFT | |
| | KDYEEHDKACVRTFYETPLQLLEKVKNVFNETKNLLDKDWNIFS | |
| | KNCNNSFAECSSQDVVTKPDCNCLYPKAIPSSDPASVSPHQPLAPS | |
| | MAPVAGLTWEDSEGTEGSSLLPGEQPLHTVDPGSAKQRPPRSTCQ | |
| | SFEPPETPVVKDSTIGGSPQPRPSVGAFNPGMEDILDSAMGTNWVP | |
| | EEASGEASEIPVPQGTELSPSRPGGGSMQTEPARPSNFLSASSPLPA | |
| | SAKGQQPADVTGTALPRVGPVRPTGQDWNHTPQKTDHPSALLRD | |
| | PPEPGSPRISSLRPQGLSNPSTLSAQPQLSRSHSSGSVLPLGELEGRR | |
| | STRDRREPKSCDKTHTCPPCPAPELLGGPSVFLFPPKPKDTLMISRT | |
| | PEVTCVVVDVSHEDPEVKFNWYVDGVEVHNAKTKPREEQYGST | |
| | YRVVSVLTVLHQDWLNGKEYKCKVSNKALPAPIEKTISKAKGQP | |
| | REPQVYTLPPSRDELTKNQVSLWCLVKGFYPSDIAVEWESNGQPE | |
| | NNYKTTPPVLDSDGSFFLYSKLTVDKSRWQQGNVFSCSVMHEAL | |
| | HNHYTQKSLSLSPGKGGSHHHHHH | |
| IGF1 | Knob: | |
| | GPETLCGAELVDALQFVCGDRGFYFNKPTGYGSSSRRAPQTGIVD | |
| | ECCFRSCDLRRLEMYCAPLKPAKSAEPKSCDKTHTCPPCPAPELLG | |
| | GPSVFLFPPKPKDTLMISRTPEVTCVVVDVSHEDPEVKFNWYVDG | |
| | VEVHNAKTKPREEQYGSTYRVVSVLTVLHQDWLNGKEYKCKVS | |
| | NKALPAPIEKTISKAKGQPREPQVYTLPPSRDELTKNQVSLWCLVK | |
| | GFYPSDIAVEWESNGQPENNYKTTPPVLDSDGSFFLYSKLTVDKSR | |
| | WQQGNVFSCSVMHEALHNHYTQKSLSLSPGKGGSHHHHHH | |
| IGF2 | Knob: | |
| | AYRPSETLCGGELVDTLQFVCGDRGFYFSRPASRVSRRSRGIVEEC | |
| | CFRSCDLALLETYCATPAKSEEPKSCDKTHTCPPCPAPELLGGPSV | |
| | FLFPPKPKDTLMISRTPEVTCVVVDVSHEDPEVKFNWYVDGVEVH | |
| | NAKTKPREEQYGSTYRVVSVLTVLHQDWLNGKEYKCKVSNKAL | |
| | PAPIEKTISKAKGQPREPQVYTLPPSRDELTKNQVSLWCLVKGFYP | |
| | SDIAVEWESNGQPENNYKTTPPVLDSDGSFFLYSKLTVDKSRWQQ | |
| | GNVFSCSVMHEALHNHYTQKSLSLSPGKGGSHHHHHH | |

### Example 14: Methods for Example 13

[0257] Extracellular and membrane protein degradation protocol: Cells (e.g., human cancer cell lines (MDA-MB-231, HeLa, A431, etc.) are plated in 6- or 12-well plates and grown to ˜70% confluency before treatment. Media is aspirated and cells are treated with bispecifics or control antibodies in complete growth medium at a concentration range of about 0.01 nM to 1 uM. For soluble ligand uptake experiments, conjugated (e.g, biotinylated) soluble ligand (e.g., VEGF, TNFa) is pre-incubated with a fluorescent dye (e.g., Streptavidin 647, pHrodo red. Concentration range of ligand-dye to add to bispecific also from about 0.01 nM-1 μM) at 37° C. for about 10, 20, 30, 40, 50, 60, 70, 80, 90, 100, 110, or 120 minutes, then mixed with bispecific (e.g., knob-in-hole, cytokine-IgG fusion, cytokine-Fab fusion, cytokine-scFv fusion) or control antibodies and added to cells. After incubation at about 4, 8, 12, 16, 20, 24, 28, 32, or 37° C. for the about 0, 1, 2, 3, 4, 5, 6, 7, days, cells are washed with phosphate-buffered saline (PBS), lifted with versene, and harvested by centrifugation at 300×g for 5 min at 4° C. Samples are then tested by western blotting or flow cytometry to quantify protein levels.

[0258] Extracellular target uptake readout protocol: Cell pellets are washed three times with cold PBS and centrifuged at 300×g for 5 minutes. Cells are then resuspended in cold PBS. Flow cytometry is performed on a CytoFLEX cytometer (Beckman Coulter) and gating is performed on single cells and live cells before acquisition of 10,000 cells. Analysis is performed using the FlowJo software package.

[0259] Membrane protein degradation readout by western blotting protocol: Cell pellets are lysed with 1× RIPA buffer containing cOmplete mini protease inhibitor cocktail (Sigma-Aldrich) at 4° C. for 40 minutes. Lysates are centrifuged at 16,000×g for 10 min at 4° C. and protein concentrations are normalized using BCA assay (Pierce). 4× NuPAGE LDS sample buffer (Invitrogen) and 2-mercaptoethanol (BME) is added to the lysates and boiled for 10 min. Equal amounts of lysates are loaded onto a 4-12% Bis-Tris gel and ran at 200V for 37 min. The gel is incubated in 20% ethanol for 10 min and transferred onto a polyvinylidene difluoride (PVDF) membrane. The membrane is blocked in PBS with 0.1% Tween-20+5% bovine serum albumin (BSA) for 30 min at room temperature with gentle shaking. Membranes are incubated overnight with primary antibodies at respective dilutions at 4° C. with gentle shaking in PBS+0.2% Tween-20+5% BSA. Membranes are washed four times with tris-buffered saline (TBS)+0.1% Tween-20 and then co-incubated with secondary antibodies for 1 hr at room temperature. Membranes are washed four times with TBS+0.1% Tween-20, then washed with PBS. Membranes are imaged using an OdysseyCLxImager (L1-COR). SuperSignal West Pico PLUS Chemiluminescent Substrate (Thermo Fisher Scientific) is then added and imaged using a ChemiDoc Imager (BioRad). Band intensities are quantified using Image Studio Software (L1-COR).

[0260] Membrane protein degradation readout by flow cytometry protocol: Cell pellets are washed with cold PBS and centrifuged at 300×g for 5 min. Cells are blocked with cold PBS+3% BSA and centrifuged (300×g for 5 min). Cells are incubated with primary antibodies diluted in PBS+3% BSA for 30 min at 4° C. Cells are washed three times with cold PBS+3% BSA and secondary antibodies (if applicable) diluted in PBS+3% BSA added and incubated for 30 min at 4° C. Cells are washed three times with cold PBS+3% BSA and resuspended in cold PBS. Flow cytometry is performed on a CytoFLEX cytometer (Beckman Coulter) and gating is performed on single cells and live cells before acquisition of 10,000 cells. Analysis is performed using the FlowJo software package.

[0261] All publications and patent applications mentioned in this disclosure are herein incorporated by reference to the same extent as if each individual publication or patent application was specifically and individually indicated to be incorporated by reference.

[0262] No admission is made that any reference cited herein constitutes prior art. The discussion of the references states what their authors assert, and the Applicant reserves the right to challenge the accuracy and pertinence of the cited documents. It will be clearly understood that, although a number of information sources, including scientific journal articles, patent documents, and textbooks, are referred to herein; this reference does not constitute an admission that any of these documents forms part of the common general knowledge in the art.

[0263] The discussion of the general methods given herein is intended for illustrative purposes only. Other alternative methods and alternatives will be apparent to those of skill in the art upon review of this disclosure, and are to be included within the spirit and purview of this application.

[0264] Throughout this specification, various patents, patent applications and other types of publications (e.g., journal articles, electronic database entries, etc.) are referenced. The disclosure of all patents, patent applications, and other publications cited herein are hereby incorporated by reference in their entirety for all purpose.

The application's sequence listing, which the Patent Office published only in electronic form, follows.

SEQUENCE LISTING (284 sequences)

SEQ ID NO: 1 - protein, 310 aa, Artificial Sequence
  Synthetic construct
KPVSLSYRCPCRFFESHVARANVKHLKILNTPNCALQIVARLKNNNRQVCIDPKLKWIQEYLEKALNPWEPKSCDKTHTCPPCPAPELLGGPSVFLFPPKPKDTLMISRTPEVTCVVVDVSHEDPEVKFNWYVDGVEVHNAKTKPREEQYGSTYRVVSVLTVLHQDWLNGKEYKCKVSNKALPAPIEKTISKAKGQPREPQVYTLPPSRDELTKNQVSLWCLVKGFYPSDIAVEWESNGQPENNYKTTPPVLDSDGSFFLYSKLTVDKSRWQQGNVFSCSVMHEALHNHYTQKSLSLSPGKGGSHHHHHH

SEQ ID NO: 2 - protein, 466 aa, Artificial Sequence
  Synthetic construct
EVQLVESGGGLVQPGGSLRLSCAASGFTFSDSWIHWVRQAPGKGLEWVAWISPYGGSTYYADSVKGRFTISADTSKNTAYLQMNSLRAEDTAVYYCARRHWPGGFDYWGQGTLVTVSSASTKGPSVFPLAPSSKSTSGGTAALGCLVKDYFPEPVTVSWNSGALTSGVHTFPAVLQSSGLYSLSSVVTVPSSSLGTQTYICNVNHKPSNTKVDKKVEPKSCEPKSCDKTHTCPPCPAPELLGGPSVFLFPPKPKDTLMISRTPEVTCVVVDVSHEDPEVKFNWYVDGVEVHNAKTKPREEQYGSTYRVVSVLTVLHQDWLNGKEYKCKVSNKALPAPIEKTISKAKGQPREPQVYTLPPSRDELTKNQVSLSCAVKGFYPSDIAVEWESNGQPENNYKTTPPVLDSDGSFFLVSKLTVDKSRWQQGNVFSCSVMHEALHNHYTQKSLSLSPGKGGSGAWSHPQFEK

SEQ ID NO: 3 - protein, 463 aa, Artificial Sequence
  Synthetic construct
EVQLVESGGGLVQPGGSLRLSCAASGFNIKDTYIHWVRQAPGKGLEWVARIYPTNGYTRYADSVKGRFTISADTSKNTAYLQMNSLRAEDTAVYYCSRWGGDGFYAMDYWGQGTLVTVSSASTKGPSVFPLAPSSKSTSGGTAALGCLVKDYFPEPVTVSWNSGALTSGVHTFPAVLQSSGLYSLSSVVTVPSSSLGTQTYICNVNHKPSNTKVDKKVEPKSCDKTHTCPPCPAPELLGGPSVFLFPPKPKDTLMISRTPEVTCVVVDVSHEDPEVKFNWYVDGVEVHNAKTKPREEQYGSTYRVVSVLTVLHQDWLNGKEYKCKVSNKALPAPIEKTISKAKGQPREPQVYTLPPSRDELTKNQVSLSCAVKGFYPSDIAVEWESNGQPENNYKTTPPVLDSDGSFFLVSKLTVDKSRWQQGNVFSCSVMHEALHNHYTQKSLSLSPGKGGSGAWSHPQFEK

SEQ ID NO: 4 - protein, 214 aa, Artificial Sequence
  Synthetic construct
DIQMTQSPSSLSASVGDRVTITCRASQDVNTAVAWYQQKPGKAPKLLIYSASFLYSGVPSRFSGSRSGTDFTLTISSLQPEDFATYYCQQHYTTPPTFGQGTKLEIKRTVAAPSVFIFPPSDEQLKSGTASVVCLLNNFYPREAKVQWKVDNALQSGNSQESVTEQDSKDSTYSLSSTLTLSKADYEKHKVYACEVTHQGLSSPVTKSFNRGEC

SEQ ID NO: 5 - protein, 449 aa, Artificial Sequence
  Synthetic construct
EISEVQLVESGGGLVQPGGSLRLSCAASGFNLSYYYIHWVRQAPGKGLEWVASIYSSSSYTSYADSVKGRFTISADTSKNTAYLQMNSLRAEDTAVYYCARAYYGFDYWGQGTLVTVSSASTKGPSVFPLAPSSKSTSGGTAALGCLVKDYFPEPVTVSWNSGALTSGVHTFPAVLQSSGLYSLSSVVTVPSSSLGTQTYICNVNHKPSNTKVDKKVEPKSCDKTHTCPPCPAPELLGGPSVFLFPPKPKDTLMISRTPEVTCVVVDVSHEDPEVKFNWYVDGVEVHNAKTKPREEQYNSTYRVVSVLTVLHQDWLNGKEYKCKVSNKALPAPIEKTISKAKGQPREPQVYTLPPIRELMTSNQVSLSCAVKGFYPSDIAVEWESNGQPENNYKTTPPVLDSDGSFFLVSKLTVDKSRWQQGNVFSCSVMHEALHNHYTQKSLSLSPGK

SEQ ID NO: 6 - protein, 463 aa, Artificial Sequence
  Synthetic construct
EVQLVESGGGLVQPGGSLRLSCAASGFNISSSYMHWVRQAPGKGLEWVAYISSYYGSTYYADSVKGRFTISRDNSKNTLYLQMNSLRAEDTAVYYCARYYSAYPRGFDYWGQGTLVTVSSASTKGPSVFPLAPSSKSTSGGTAALGCLVKDYFPEPVTVSWNSGALTSGVHTFPAVLQSSGLYSLSSVVTVPSSSLGTQTYICNVNHKPSNTKVDKKVEPKSCDKTHTCPPCPAPELLGGPSVFLFPPKPKDTLMISRTPEVTCVVVDVSHEDPEVKFNWYVDGVEVHNAKTKPREEQYGSTYRVVSVLTVLHQDWLNGKEYKCKVSNKALPAPIEKTISKAKGQPREPQVYTLPPSRDELTKNQVSLSCAVKGFYPSDIAVEWESNGQPENNYKTTPPVLDSDGSFFLVSKLTVDKSRWQQGNVFSCSVMHEALHNHYTQKSLSLSPGKGGSGAWSHPQFEK

SEQ ID NO: 7 - protein, 210 aa, Artificial Sequence
  Synthetic construct
DIQMTQSPSSLSASVGDRVTITCRASQSVGSALAWYQQKPGKAPKLLIYSASSLYSGVPSRFSGSRSGTDFTLTISSLQPEDFATYYCQQSSYHHPITFGQGTKVEIKRTVAAPSVFIFPPSDSQLKSGTASVVCLLNNFYPREAKVQWKVDNALQSGNSQESVTEQDSKDSTYSLSSTLTLSKADYEKHKVYACEVTHQGLSSPVTKSF

SEQ ID NO: 8 - protein, 308 aa, Artificial Sequence
  Synthetic construct
VSLSYRCPCRFFESHVARANVKHLKILNTPNCALQIVARLKNNNRQVCIDPKLKWIQEYLEKALNPWEPKSCDKTHTCPPCPAPELLGGPSVFLFPPKPKDTLMISRTPEVTCVVVDVSHEDPEVKFNWYVDGVEVHNAKTKPREEQYGSTYRVVSVLTVLHQDWLNGKEYKCKVSNKALPAPIEKTISKAKGQPREPQVYTLPPSRDELTKNQVSLWCLVKGFYPSDIAVEWESNGQPENNYKTTPPVLDSDGSFFLYSKLTVDKSRWQQGNVFSCSVMHEALHNHYTQKSLSLSPGKGGSHHHHHH

SEQ ID NO: 9 - protein, 466 aa, Artificial Sequence; identical to SEQ ID NO: 2
  Synthetic construct

SEQ ID NO: 10 - protein, 310 aa, Artificial Sequence
  Synthetic construct
KPVSLSYECPCRFFESHVARANVKHLKILNTPNCALQIVARLKNNNRQVCIDPKLKWIQEYLEKALNPWEPKSCDKTHTCPPCPAPELLGGPSVFLFPPKPKDTLMISRTPEVTCVVVDVSHEDPEVKFNWYVDGVEVHNAKTKPREEQYGSTYRVVSVLTVLHQDWLNGKEYKCKVSNKALPAPIEKTISKAKGQPREPQVYTLPPSRDELTKNQVSLWCLVKGFYPSDIAVEWESNGQPENNYKTTPPVLDSDGSFFLYSKLTVDKSRWQQGNVFSCSVMHEALHNHYTQKSLSLSPGKGGSHHHHHH

SEQ ID NO: 11 - protein, 466 aa, Artificial Sequence; identical to SEQ ID NO: 2
  Synthetic construct

SEQ ID NO: 12 - protein, 306 aa, Artificial Sequence
  Synthetic construct
LSYRCPCRFFESHVARANVKHLKILNTPNCALQIVARLKNNNRQVCIDPKLKWIQEYLEKALNPWEPKSCDKTHTCPPCPAPELLGGPSVFLFPPKPKDTLMISRTPEVTCVVVDVSHEDPEVKFNWYVDGVEVHNAKTKPREEQYGSTYRVVSVLTVLHQDWLNGKEYKCKVSNKALPAPIEKTISKAKGQPREPQVYTLPPSRDELTKNQVSLWCLVKGFYPSDIAVEWESNGQPENNYKTTPPVLDSDGSFFLYSKLTVDKSRWQQGNVFSCSVMHEALHNHYTQKSLSLSPGKGGSHHHHHH

SEQ ID NO: 13 - protein, 466 aa, Artificial Sequence; identical to SEQ ID NO: 2
  Synthetic construct

SEQ ID NO: 14 - protein, 466 aa, Artificial Sequence
  Synthetic construct
EVQLVESGGGLVQPGGSLRLSCAASGFTFSDSWIHWVRQAPGKGLEWVAWISPYGGATYYADSVKGRFTISADTSKNTAYLQMNSLRAEDTAVYYCARRHWPGGFDYWGQGTLVTVSSASTKGPSVFPLAPSSKSTSGGTAALGCLVKDYFPEPVTVSWNSGALTSGVHTFPAVLQSSGLYSLSSVVTVPSSSLGTQTYICNVNHKPSNTKVDKKVEPKSCEPKSCDKTHTCPPCPAPELLGGPSVFLFPPKPKDTLMISRTPEVTCVVVDVSHEDPEVKFNWYVDGVEVHNAKTKPREEQYGSTYRVVSVLTVLHQDWLNGKEYKCKVSNKALPAPIEKTISKAKGQPREPQVYTLPPSRDELTKNQVSLSCAVKGFYPSDIAVEWESNGQPENNYKTTPPVLDSDGSFFLVSKLTVDKSRWQQGNVFSCSVMHEALHNHYTQKSLSLSPGKGGSGAWSHPQFEK

SEQ ID NO: 15 - protein, 466 aa, Artificial Sequence
  Synthetic construct
EVQLVESGGGLVQPGGSLRLSCAASGFTFSASWIHWVRQAPGKGLEWVAWISPYGGSTYYADSVKGRFTISADTSKNTAYLQMNSLRAEDTAVYYCARRHWPGGFDYWGQGTLVTVSSASTKGPSVFPLAPSSKSTSGGTAALGCLVKDYFPEPVTVSWNSGALTSGVHTFPAVLQSSGLYSLSSVVTVPSSSLGTQTYICNVNHKPSNTKVDKKVEPKSCEPKSCDKTHTCPPCPAPELLGGPSVFLFPPKPKDTLMISRTPEVTCVVVDVSHEDPEVKFNWYVDGVEVHNAKTKPREEQYGSTYRVVSVLTVLHQDWLNGKEYKCKVSNKALPAPIEKTISKAKGQPREPQVYTLPPSRDELTKNQVSLSCAVKGFYPSDIAVEWESNGQPENNYKTTPPVLDSDGSFFLVSKLTVDKSRWQQGNVFSCSVMHEALHNHYTQKSLSLSPGKGGSGAWSHPQFEK

SEQ ID NO: 16 - protein, 466 aa, Artificial Sequence
  Synthetic construct
EVQLVESGGGLVQPGGSLRLSCAASGFTFADSWIHWVRQAPGKGLEWVAWISPYGGSTYYADSVKGRFTISADTSKNTAYLQMNSLRAEDTAVYYCARRHWPGGFDYWGQGTLVTVSSASTKGPSVFPLAPSSKSTSGGTAALGCLVKDYFPEPVTVSWNSGALTSGVHTFPAVLQSSGLYSLSSVVTVPSSSLGTQTYICNVNHKPSNTKVDKKVEPKSCEPKSCDKTHTCPPCPAPELLGGPSVFLFPPKPKDTLMISRTPEVTCVVVDVSHEDPEVKFNWYVDGVEVHNAKTKPREEQYGSTYRVVSVLTVLHQDWLNGKEYKCKVSNKALPAPIEKTISKAKGQPREPQVYTLPPSRDELTKNQVSLSCAVKGFYPSDIAVEWESNGQPENNYKTTPPVLDSDGSFFLVSKLTVDKSRWQQGNVFSCSVMHEALHNHYTQKSLSLSPGKGGSGAWSHPQFEK

SEQ ID NO: 17 - protein, 466 aa, Artificial Sequence
  Synthetic construct
EVQLVESGGGLVQPGGSLRLSCAASGFTFSDSAIHWVRQAPGKGLEWVAWISPYGGSTYYADSVKGRFTISADTSKNTAYLQMNSLRAEDTAVYYCARRHWPGGFDYWGQGTLVTVSSASTKGPSVFPLAPSSKSTSGGTAALGCLVKDYFPEPVTVSWNSGALTSGVHTFPAVLQSSGLYSLSSVVTVPSSSLGTQTYICNVNHKPSNTKVDKKVEPKSCEPKSCDKTHTCPPCPAPELLGGPSVFLFPPKPKDTLMISRTPEVTCVVVDVSHEDPEVKFNWYVDGVEVHNAKTKPREEQYGSTYRVVSVLTVLHQDWLNGKEYKCKVSNKALPAPIEKTISKAKGQPREPQVYTLPPSRDELTKNQVSLSCAVKGFYPSDIAVEWESNGQPENNYKTTPPVLDSDGSFFLVSKLTVDKSRWQQGNVFSCSVMHEALHNHYTQKSLSLSPGKGGSGAWSHPQFEK

SEQ ID NO: 18 - protein, 466 aa, Artificial Sequence
  Synthetic construct
EVQLVESGGGLVQPGGSLRLSCAASGFTFSDSWIHWVRQAPGKGLEWVAAISPYGGSTYYADSVKGRFTISADTSKNTAYLQMNSLRAEDTAVYYCARRHWPGGFDYWGQGTLVTVSSASTKGPSVFPLAPSSKSTSGGTAALGCLVKDYFPEPVTVSWNSGALTSGVHTFPAVLQSSGLYSLSSVVTVPSSSLGTQTYICNVNHKPSNTKVDKKVEPKSCEPKSCDKTHTCPPCPAPELLGGPSVFLFPPKPKDTLMISRTPEVTCVVVDVSHEDPEVKFNWYVDGVEVHNAKTKPREEQYGSTYRVVSVLTVLHQDWLNGKEYKCKVSNKALPAPIEKTISKAKGQPREPQVYTLPPSRDELTKNQVSLSCAVKGFYPSDIAVEWESNGQPENNYKTTPPVLDSDGSFFLVSKLTVDKSRWQQGNVFSCSVMHEALHNHYTQKSLSLSPGKGGSGAWSHPQFEK

SEQ ID NO: 19 - protein, 466 aa, Artificial Sequence
  Synthetic construct
EVQLVESGGGLVQPGGSLRLSCAASGFTFSDSWIHWVRQAPGKGLEWVAWISPYGGSTYYADSVKGRFTISADTSKNTAYLQMNSLRAEDTAVYYCARRHAPGGFDYWGQGTLVTVSSASTKGPSVFPLAPSSKSTSGGTAALGCLVKDYFPEPVTVSWNSGALTSGVHTFPAVLQSSGLYSLSSVVTVPSSSLGTQTYICNVNHKPSNTKVDKKVEPKSCEPKSCDKTHTCPPCPAPELLGGPSVFLFPPKPKDTLMISRTPEVTCVVVDVSHEDPEVKFNWYVDGVEVHNAKTKPREEQYGSTYRVVSVLTVLHQDWLNGKEYKCKVSNKALPAPIEKTISKAKGQPREPQVYTLPPSRDELTKNQVSLSCAVKGFYPSDIAVEWESNGQPENNYKTTPPVLDSDGSFFLVSKLTVDKSRWQQGNVFSCSVMHEALHNHYTQKSLSLSPGKGGSGAWSHPQFEK

SEQ ID NO: 20 - protein, 466 aa, Artificial Sequence; identical to SEQ ID NO: 2
  Synthetic construct

SEQ ID NO: 21 - protein, 214 aa, Artificial Sequence
  Synthetic construct
DIQMTQSPSSLSASVGDRVTITCRASQDVATAVAWYQQKPGKAPKLLIYSASFLYSGVPSRFSGSGSGTDFTLTISSLQPEDFATYYCQQYLYHPATFGQGTKVEIKRTVAAPSVFIFPPSDEQLKSGTASVVCLLNNFYPREAKVQWKVDNALQSGNSQESVTEQDSKDSTYSLSSTLTLSKADYEKHKVYACEVTHQGLSSPVTKSFNRGEC

SEQ ID NO: 22 - protein, 466 aa, Artificial Sequence; identical to SEQ ID NO: 2
  Synthetic construct

SEQ ID NO: 23 - protein, 214 aa, Artificial Sequence
  Synthetic construct
DIQMTQSPSSLSASVGDRVTITCRASQDVSTAVAWYQQKPGKAPKLLIYSASFLYSGVPSRFSGSGSGTDFTLTISSLQPEDFATYYCQQYLAHPATFGQGTKVEIKRTVAAPSVFIFPPSDEQLKSGTASVVCLLNNFYPREAKVQWKVDNALQSGNSQESVTEQDSKDSTYSLSSTLTLSKADYEKHKVYACEVTHQGLSSPVTKSFNRGEC

SEQ ID NO: 24 - protein, 466 aa, Artificial Sequence; identical to SEQ ID NO: 2
  Synthetic construct

SEQ ID NO: 25 - protein, 214 aa, Artificial Sequence
  Synthetic construct
DIQMTQSPSSLSASVGDRVTITCRASQDVSTAVAWYQQKPGKAPKLLIYSASFLYSGVPSRFSGSGSGTDFTLTISSLQPEDFATYYCQQYAYHPATFGQGTKVEIKRTVAAPSVFIFPPSDEQLKSGTASVVCLLNNFYPREAKVQWKVDNALQSGNSQESVTEQDSKDSTYSLSSTLTLSKADYEKHKVYACEVTHQGLSSPVTKSFNRGEC

SEQ ID NO: 26 - protein, 466 aa, Artificial Sequence
  Synthetic construct
QVQLVQSGAEVKKPGSSVKVSCKTSGDTFSTYAISWVRQAPGQGLEWMGGIIPIFGKAHYAQKFQGRVTITADESTSTAYMELSSLRSEDTAVYFCARKFHFVSGSPFGMDVWGQGTTVTVSSASTKGPSVFPLAPSSKSTSGGTAALGCLVKDYFPEPVTVSWNSGALTSGVHTFPAVLQSSGLYSLSSVVTVPSSSLGTQTYICNVNHKPSNTKVDKKVEPKSCDKTHTCPPCPAPELLGGPSVFLFPPKPKDTLMISRTPEVTCVVVDVSHEDPEVKFNWYVDGVEVHNAKTKPREEQYGSTYRVVSVLTVLHQDWLNGKEYKCKVSNKALPAPIEKTISKAKGQPREPQVYTLPPSRDELTKNQVSLSCAVKGFYPSDIAVEWESNGQPENNYKTTPPVLDSDGSFFLVSKLTVDKSRWQQGNVFSCSVMHEALHNHYTQKSLSLSPGKGGSGAWSHPQFEK

SEQ ID NO: 27 - protein, 213 aa, Artificial Sequence
  Synthetic construct
EIVLTQSPATLSLSPGERATLSCRASQSVSSYLAWYQQKPGQAPRLLIYDASNRATGIPARFSGSGSGTDFTLTISSLEPEDFAVYYCQQRSNWPTFGQGTKVEIKRTVAAPSVFIFPPSDEQLKSGTASVVCLLNNFYPREAKVQWKVDNALQSGNSQESVTEQDSKDSTYSLSSTLTLSKADYEKHKVYACEVTHQGLSSPVTKSFNRGEC

SEQ ID NO: 28 - protein, 310 aa, Artificial Sequence
  Synthetic construct
KPVSLSYRCPCRFFESHVARANVKHLKILNTPNCALQIVARLKNNNRQVCIDPKLKWIQEYLEKALNPWEPKSCDKTHTCPPCPAPELLGGPSVFLFPPKPKDTLMISRTPEVTCVVVDVSHEDPEVKFNWYVDGVEVHNAKTKPREEQYNSTYRVVSVLTVLHQDWLNGKEYKCKVSNKALPAPIEKTISKAKGQPREPQVYTLPPSRDELTKNQVSLWCLVKGFYPSDIAVEWESNGQPENNYKTTPPVLDSDGSFFLYSKLTVDKSRWQQGNVFSCSVMHEALHNHYTQKSLSLSPGKGGSHHHHHH

SEQ ID NO: 29 - protein, 463 aa, Artificial Sequence
  Synthetic construct
EVQLVESGGGLVQPGGSLRLSCAASGFNISSSYMHWVRQAPGKGLEWVAYISSYYGSTYYADSVKGRFTISRDNSKNTLYLQMNSLRAEDTAVYYCARYYSAYPRGFDYWGQGTLVTVSSASTKGPSVFPLAPSSKSTSGGTAALGCLVKDYFPEPVTVSWNSGALTSGVHTFPAVLQSSGLYSLSSVVTVPSSSLGTQTYICNVNHKPSNTKVDKKVEPKSCDKTHTCPPCPAPELLGGPSVFLFPPKPKDTLMISRTPEVTCVVVDVSHEDPEVKFNWYVDGVEVHNAKTKPREEQYNSTYRVVSVLTVLHQDWLNGKEYKCKVSNKALPAPIEKTISKAKGQPREPQVYTLPPSRDELTKNQVSLSCAVKGFYPSDIAVEWESNGQPENNYKTTPPVLDSDGSFFLVSKLTVDKSRWQQGNVFSCSVMHEALHNHYTQKSLSLSPGKGGSGAWSHPQFEK

SEQ ID NO: 30 - protein, 326 aa, Artificial Sequence
  Synthetic construct
KPVSLSYRCPCRFFESHVARANVKHLKILNTPNCALQIVARLKNNNRQVCIDPKLKWIQEYLEKALNKRFKMPWDKTHTGGSGSAGGLNDIFEAQKIEWHESSGSEVQLVESGGGLVQPGGSLRLSCAASGFTFSDSWIHWVRQAPGKGLEWVAWISPYGGSTYYADSVKGRFTISADTSKNTAYLQMNSLRAEDTAVYYCARRHWPGGFDYWGQGTLVTVSSASTKGPSVFPLAPSSKSTSGGTAALGCLVKDYFPEPVTVSWNSGALTSGVHTFPAVLQSSGLYSLSSVVTVPSSSLGTQTYICNVNHKPSNTKVDKKVEPKSC

SEQ ID NO: 31 - protein, 248 aa, Artificial Sequence
  Synthetic construct
EISEVQLVESGGGLVQPGGSLRLSCAASGFNIKDTYIHWVRQAPGKGLEWVARIYPTNGYTRYADSVKGRFTISADTSKNTAYLQMNSLRAEDTAVYYCSRWGGDGFYAMDYWGQGTLVTVSSASTKGPSVFPLAPSSKSTSGGTAALGCLVKDYFPEPVTVSWNSGALTSGVHTFPAVLQSSGLYSLSSVVTVPSSSLGTQTYICNVNHKPSNTKVDKKVDKTHTGGSGSAGGLNDIFEAQKIEWHE

SEQ ID NO: 32 - protein, 453 aa, Artificial Sequence
  Synthetic construct
EISEVQLVESGGGLVQPGGSLRLSCAASGFNIKDTYIHWVRQAPGKGLEWVARIYPTNGYTRYADSVKGRFTISADTSKNTAYLQMNSLRAEDTAVYYCSRWGGDGFYAMDYWGQGTLVTVSSASTKGPSVFPLAPSSKSTSGGTAALGCLVKDYFPEPVTVSWNSGALTSGVHTFPAVLQSSGLYSLSSVVTVPSSSLGTQTYICNVNHKPSNTKVDKKVEPKSCDKTHTCPPCPAPELLGGPSVFLFPPKPKDTLMISRTPEVTCVVVDVSHEDPEVKFNWYVDGVEVHNAKTKPREEQYNSTYRVVSVLTVLHQDWLNGKEYKCKVSNKALPAPIEKTISKAKGQPREPQVYTLPPSRDELTKNQVSLTCLVKGFYPSDIAVEWESNGQPENNYKTTPPVLDSDGSFFLYSKLTVDKSRWQQGNVFSCSVMHEALHNHYTQKSLSLSPGK

SEQ ID NO: 33 - protein, 243 aa, Artificial Sequence
  Synthetic construct
EVQLVESGGGLVQPGGSLRLSCAASGFTFSDSWIHWVRQAPGKGLEWVAWISPYGGSTYYADSVKGRFTISADTSKNTAYLQMNSLRAEDTAVYYCARRHWPGGFDYWGQGTLVTVSSASTKGPSVFPLAPSSKSTSGGTAALGCLVKDYFPEPVTVSWNSGALTSGVHTFPAVLQSSGLYSLSSVVTVPSSSLGTQTYICNVNHKPSNTKVDKKVDKTHTGGSGSAGGLNDIFEAQKIEWHE

SEQ ID NO: 34 - protein, 368 aa, Artificial Sequence
  Synthetic construct
EVQLVESGGGLVQPGGSLRLSCAASGFRIYSYYSYIGWVRRAPGKGEELVARIYPSSGYTYYADSVKGRFTISADTSKNTAYLQMNSLRAEDTAVYYCARWDFASPYYPGSSGLDYWGQGTLVTVSSEPKSCDKTHTCPPCPAPELLGGPSVFLFPPKPKDTLMISRTPEVTCVVVDVSHEDPEVKFNWYVDGVEVHNAKTKPREEQYGSTYRVVSVLTVLHQDWLNGKEYKCKVSNKALPAPIEKTISKAKGQPREPQVYTLPPSRDELTKNQVSLWCLVKGFYPSDIAVEWESNGQPENNYKTTPPVLDSDGSFFLYSKLTVDKSRWQQGNVFSCSVMHEALHNHYTQKSLSLSPGKGGSHHHHHH

SEQ ID NO: 35 - protein, 466 aa, Artificial Sequence; identical to SEQ ID NO: 2
  Synthetic construct

SEQ ID NO: 36 - protein, 244 aa, Artificial Sequence
  Synthetic construct
EISEVQLVESGGGLVQPGGSLRLSCAASGFNLSYYYIHWVRQAPGKGLEWVASIYSSSSYTSYADSVKGRFTISADTSKNTAYLQMNSLRAEDTAVYYCARAYYGFDYWGQGTLVTVSSASTKGPSVFPLAPSSKSTSGGTAALGCLVKDYFPEPVTVSWNSGALTSGVHTFPAVLQSSGLYSLSSVVTVPSSSLGTQTYICNVNHKPSNTKVDKKVDKTHTGGSGSAGGLNDIFEAQKIEWHE

SEQ ID NO: 37 - protein, 226 aa, Artificial Sequence
  Synthetic construct
DIQMTQSPSSLSASVGDRVTITCRASQSVSSAVAWYQQKPGKAPKLLIYSASSLYSGVPSRFSGSRSGTDFTLTISSLQPEDFATYYCQQSYYYYPITFGQGTKVEIKRTVAAPSVFIFPPSDSQLKSGTASVVCLLNNFYPREAKVQWKVDNALQSGNSQESVTEQDSKDSTYSLSSTLTLSKADYEKHKVYACEVTHQGLSSPVTKSFNRGECGGSDYKDDDDK

SEQ ID NO: 38 - protein, 462 aa, Artificial Sequence
  Synthetic construct
QVQLKQSGPGLVQPSQSLSITCTVSGFSLTNYGVHWVRQSPGKGLEWLGVIWSGGNTDYNTPFTSRLSINKDNSKSQVFFKMNSLQSNDTAIYYCARALTYYDYEFAYWGQGTLVTVSAASTKGPSVFPLAPSSKSTSGGTAALGCLVKDYFPEPVTVSWNSGALTSGVHTFPAVLQSSGLYSLSSVVTVPSSSLGTQTYICNVNHKPSNTKVDKKVEPKSCDKTHTCPPCPAPELLGGPSVFLFPPKPKDTLMISRTPEVTCVVVDVSHEDPEVKFNWYVDGVEVHNAKTKPREEQYGSTYRVVSVLTVLHQDWLNGKEYKCKVSNKALPAPIEKTISKAKGQPREPQVYTLPPSRDELTKNQVSLSCAVKGFYPSDIAVEWESNGQPENNYKTTPPVLDSDGSFFLVSKLTVDKSRWQQGNVFSCSVMHEALHNHYTQKSLSLSPGKGGSGAWSHPQFEK

SEQ ID NO: 39 - protein, 214 aa, Artificial Sequence
  Synthetic construct
DILLTQSPVILSVSPGERVSFSCRASQSIGTNIHWYQQRTNGSPRLLIKYASESISGIPSRFSGSGSGTDFTLSINSVESEDIADYYCQQNNNWPTTFGAGTKLELKRTVAAPSVFIFPPSDEQLKSGTASVVCLLNNFYPREAKVQWKVDNALQSGNSQESVTEQDSKDSTYSLSSTLTLSKADYEKHKVYACEVTHQGLSSPVTKSFNRGEC

SEQ ID NO: 40 - protein, 214 aa, Artificial Sequence
  Synthetic construct
DIQMTQSPSSLSASVGDRVTITCRASQDVSTAVAWYQQKPGKAPKLLIYSASFLYSGVPSRFSGSGSGTDFTLTISSLQPEDFATYYCQQYLYHPATFGQGTKVEIKRTVAAPSVFIFPPSDEQLKSGTASVVCLLNNFYPREAKVQWKVDNALQSGNSQESVTEQDSKDSTYSLSSTLTLSKADYEKHKVYACEVTHQGLSSPVTKSFNRGEC

SEQ ID NO: 41 - protein, 311 aa, Artificial Sequence
  Synthetic construct
LGGGSLSYRCPCRFFESHVARANVKHLKILNTPNCALQIVARLKNNNRQVCIDPKLKWIQEYLEKALNPWEPKSCDKTHTCPPCPAPELLGGPSVFLFPPKPKDTLMISRTPEVTCVVVDVSHEDPEVKFNWYVDGVEVHNAKTKPREEQYGSTYRVVSVLTVLHQDWLNGKEYKCKVSNKALPAPIEKTISKAKGQPREPQVYTLPPSRDELTKNQVSLWCLVKGFYPSDIAVEWESNGQPENNYKTTPPVLDSDGSFFLYSKLTVDKSRWQQGNVFSCSVMHEALHNHYTQKSLSLSPGKGGSHHHHHH

SEQ ID NO: 42 - protein, 466 aa, Artificial Sequence; identical to SEQ ID NO: 2
  Synthetic construct

SEQ ID NO: 43 - protein, 214 aa, Artificial Sequence; identical to SEQ ID NO: 40
  Synthetic construct

SEQ ID NO: 44 - protein, 310 aa, Artificial Sequence
  Synthetic construct
RPVSLSYRCPCRFFESHVARANVKHLKILNTPNCALQIVARLKNNNRQVCIDPKLKWIQEYLEKALNPWEPKSCDKTHTCPPCPAPELLGGPSVFLFPPKPKDTLMISRTPEVTCVVVDVSHEDPEVKFNWYVDGVEVHNAKTKPREEQYGSTYRVVSVLTVLHQDWLNGKEYKCKVSNKALPAPIEKTISKAKGQPREPQVYTLPPSRDELTKNQVSLWCLVKGFYPSDIAVEWESNGQPENNYKTTPPVLDSDGSFFLYSKLTVDKSRWQQGNVFSCSVMHEALHNHYTQKSLSLSPGKGGSHHHHHH

SEQ ID NO: 45 - protein, 466 aa, Artificial Sequence; identical to SEQ ID NO: 2
  Synthetic construct

SEQ ID NO: 46 - protein, 214 aa, Artificial Sequence; identical to SEQ ID NO: 40
  Synthetic construct

SEQ ID NO: 47 - protein, 310 aa, Artificial Sequence
  Synthetic construct
KGVSLSYRCPCRFFESHVARANVKHLKILNTPNCALQIVARLKNNNRQVCIDPKLKWIQEYLEKALNPWEPKSCDKTHTCPPCPAPELLGGPSVFLFPPKPKDTLMISRTPEVTCVVVDVSHEDPEVKFNWYVDGVEVHNAKTKPREEQYGSTYRVVSVLTVLHQDWLNGKEYKCKVSNKALPAPIEKTISKAKGQPREPQVYTLPPSRDELTKNQVSLWCLVKGFYPSDIAVEWESNGQPENNYKTTPPVLDSDGSFFLYSKLTVDKSRWQQGNVFSCSVMHEALHNHYTQKSLSLSPGKGGSHHHHHH

SEQ ID NO: 48 - protein, 466 aa, Artificial Sequence; identical to SEQ ID NO: 2
  Synthetic construct

SEQ ID NO: 49 - protein, 214 aa, Artificial Sequence; identical to SEQ ID NO: 40
  Synthetic construct

SEQ ID NO: 50 - protein, 311 aa, Artificial Sequence
  Synthetic construct
VPGASLSYRCPCRFFESHVARANVKHLKILNTPNCALQIVARLKNNNRQVCIDPKLKWIQEYLEKALNPWEPKSCDKTHTCPPCPAPELLGGPSVFLFPPKPKDTLMISRTPEVTCVVVDVSHEDPEVKFNWYVDGVEVHNAKTKPREEQYGSTYRVVSVLTVLHQDWLNGKEYKCKVSNKALPAPIEKTISKAKGQPREPQVYTLPPSRDELTKNQVSLWCLVKGFYPSDIAVEWESNGQPENNYKTTPPVLDSDGSFFLYSKLTVDKSRWQQGNVFSCSVMHEALHNHYTQKSLSLSPGKGGSHHHHHH

SEQ ID NO: 51 - protein, 466 aa, Artificial Sequence; identical to SEQ ID NO: 2
  Synthetic construct

SEQ ID NO: 52 - protein, 214 aa, Artificial Sequence; identical to SEQ ID NO: 40
  Synthetic construct

SEQ ID NO: 53 - protein, 311 aa, Artificial Sequence
  Synthetic construct
QWVASLSYRCPCRFFESHVARANVKHLKILNTPNCALQIVARLKNNNRQVCIDPKLKWIQEYLEKALNPWEPKSCDKTHTCPPCPAPELLGGPSVFLFPPKPKDTLMISRTPEVTCVVVDVSHEDPEVKFNWYVDGVEVHNAKTKPREEQYGSTYRVVSVLTVLHQDWLNGKEYKCKVSNKALPAPIEKTISKAKGQPREPQVYTLPPSRDELTKNQVSLWCLVKGFYPSDIAVEWESNGQPENNYKTTPPVLDSDGSFFLYSKLTVDKSRWQQGNVFSCSVMHEALHNHYTQKSLSLSPGKGGSHHHHHH

SEQ ID NO: 54 - protein, 466 aa, Artificial Sequence; identical to SEQ ID NO: 2
  Synthetic construct

SEQ ID NO: 55 - protein, 214 aa, Artificial Sequence; identical to SEQ ID NO: 40
  Synthetic construct

SEQ ID NO: 56 - protein, 311 aa, Artificial Sequence
  Synthetic construct
SQSQSLSYRCPCRFFESHVARANVKHLKILNTPNCALQIVARLKNNNRQVCIDPKLKWIQEYLEKALNPWEPKSCDKTHTCPPCPAPELLGGPSVFLFPPKPKDTLMISRTPEVTCVVVDVSHEDPEVKFNWYVDGVEVHNAKTKPREEQYGSTYRVVSVLTVLHQDWLNGKEYKCKVSNKALPAPIEKTISKAKGQPREPQVYTLPPSRDELTKNQVSLWCLVKGFYPSDIAVEWESNGQPENNYKTTPPVLDSDGSFFLYSKLTVDKSRWQQGNVFSCSVMHEALHNHYTQKSLSLSPGKGGSHHHHHH

SEQ ID NO: 57 - protein, 466 aa, Artificial Sequence; identical to SEQ ID NO: 2
  Synthetic construct

SEQ ID NO: 58 - protein, 214 aa, Artificial Sequence; identical to SEQ ID NO: 40
  Synthetic construct

SEQ ID NO: 59 - protein, 310 aa, Artificial Sequence; identical to SEQ ID NO: 1
  Synthetic construct

SEQ ID NO: 60 - protein, 461 aa, Artificial Sequence
  Synthetic construct
QVQLVESGGGVVQPGRSLRLDCKASGITFSNSGMHWVRQAPGKGLEWVAVIWYDGSKRYYADSVKGRFTISRDNSKNTLFLQMNSLRAEDTAVYYCATNDDYWGQGTLVTVSSASTKGPSVFPLAPSSKSTSGGTAALGCLVKDYFPEPVTVSWNSGALTSGVHTFPAVLQSSGLYSLSSVVTVPSSSLGTQTYICNVNHKPSNTKVDKKVEPKSCEPKSCDKTHTCPPCPAPELLGGPSVFLFPPKPKDTLMISRTPEVTCVVVDVSHEDPEVKFNWYVDGVEVHNAKTKPREEQYGSTYRVVSVLTVLHQDWLNGKEYKCKVSNKALPAPIEKTISKAKGQPREPQVYTLPPSRDELTKNQVSLSCAVKGFYPSDIAVEWESNGQPENNYKTTPPVLDSDGSFFLVSKLTVDKSRWQQGNVFSCSVMHEALHNHYTQKSLSLSPGKGGSGAWSHPQFEK

SEQ ID NO: 61 - protein, 214 aa, Artificial Sequence
  Synthetic construct
EIVLTQSPATLSLSPGERATLSCRASQSVSSYLAWYQQKPGQAPRLLIYDASNRATGIPARFSGSGSGTDFTLTISSLEPEDFAVYYCQQSSNWPRTFGQGTKVEIKRTVAAPSVFIFPPSDEQLKSGTASVVCLLNNFYPREAKVQWKVDNALQSGNSQESVTEQDSKDSTYSLSSTLTLSKADYEKHKVYACEVTHQGLSSPVTKSFNRGEC

SEQ ID NO: 62 - protein, 374 aa, Artificial Sequence
  Synthetic construct
APTSSSTKKTQLQLEHLLLDLQMILNGINNYKNPKLTRMLTFKFYMPKKATELKHLQCLEEELKPLEEVLNLAQSKNFHLRPRDLISNINVIVLELKGSETTFMCEYADETATIVEFLNRWITFCQSIISTLTEPKSCDKTHTCPPCPAPELLGGPSVFLFPPKPKDTLMISRTPEVTCVVVDVSHEDPEVKFNWYVDGVEVHNAKTKPREEQYGSTYRVVSVLTVLHQDWLNGKEYKCKVSNKALPAPIEKTISKAKGQPREPQVYTLPPSRDELTKNQVSLWCLVKGFYPSDIAVEWESNGQPENNYKTTPPVLDSDGSFFLYSKLTVDKSRWQQGNVFSCSVMHEALHNHYTQKSLSLSPGKGGSHHHHHH

SEQ ID NO: 63 - protein, 461 aa, Artificial Sequence; identical to SEQ ID NO: 60
  Synthetic construct

SEQ ID NO: 64 - protein, 214 aa, Artificial Sequence; identical to SEQ ID NO: 61
  Synthetic construct

SEQ ID NO: 65 - protein, 310 aa, Artificial Sequence; identical to SEQ ID NO: 1
  Synthetic construct

SEQ ID NO: 66 - protein, 451 aa, Artificial Sequence
  Synthetic construct
QVQLQESGPGLVKPSQTLSLTCTVSGGSISSGDYYWSWIRQPPGKGLEWIGYIYYSGSTDYNPSLKSRVTMSVDTSKNQFSLKVNSVTAADTAVYYCARVSIFGVGTFDYWGQGTLVTVSSASTKGPSVLPLAPSSKSTSGGTAALGCLVKDYFPEPVTVSWNSGALTSGVHTFPAVLQSSGLYSLSSVVTVPSSSLGTQTYICNVNHKPSNTKVDKKVEPKSCDKTHTCPPCPAPELLGGPSVFLFPPKPKDTLMISRTPEVTCVVVDVSHEDPEVKFNWYVDGVEVHNAKTKPREEQYNSTYRVVSVLTVLHQDWLNGKEYKCKVSNKALPAPIEKTISKAKGQPREPQVYTLPPSRDELTKNQVSLSCAVKGFYPSDIAVEWESNGQPENNYKTTPPVLDSDGSFFLVSKLTVDKSRWQQGNVFSCSVMHEALHNHYTQKSLSLSPGK

SEQ ID NO: 67 - protein, 214 aa, Artificial Sequence
  Synthetic construct
EIVMTQSPATLSLSPGERATLSCRASQSVSSYLAWYQQKPGQAPRLLIYDASNRATGIPARFSGSGSGTDFTLTISSLEPEDFAVYYCHQYGSTPLTFGGGTKAEIKRTVAAPSVFIFPPSDEQLKSGTASVVCLLNNFYPREAKVQWKVDNALQSGNSQESVTEQDSKDSTYSLSSTLTLSKADYEKHKVYACEVTHQGLSSPVTKSFNRGEC

SEQ ID NO: 68 - protein, 310 aa, Artificial Sequence; identical to SEQ ID NO: 1
  Synthetic construct

SEQ ID NO: 69 - protein, 449 aa, Artificial Sequence
  Synthetic construct
QVQLQESGPGLVKPSETLSLTCTVSGGSVSSGDYYWTWIRQSPGKGLEWIGHIYYSGNTNYNPSLKSRLTISIDTSKTQFSLKLSSVTAADTAIYYCVRDRVTGAFDIWGQGTMVTVSSASTKGPSVFPLAPCSRSTSESTAALGCLVKDYFPEPVTVSWNSGALTSGVHTFPAVLQSSGLYSLSSVVTVPSSSLGTQTYICNVNHKPSNTKVDKKVEPKSCDKTHTCPPCPAPELLGGPSVFLFPPKPKDTLMISRTPEVTCVVVDVSHEDPEVKFNWYVDGVEVHNAKTKPREEQYNSTYRVVSVLTVLHQDWLNGKEYKCKVSNKALPAPIEKTISKAKGQPREPQVYTLPPSRDELTKNQVSLSCAVKGFYPSDIAVEWESNGQPENNYKTTPPVLDSDGSFFLVSKLTVDKSRWQQGNVFSCSVMHEALHNHYTQKSLSLSPGK

SEQ ID NO: 70 - protein, 214 aa, Artificial Sequence
  Synthetic construct
DIQMTQSPSSLSASVGDRVTITCQASQDISNYLNWYQQKPGKAPKLLIYDASNLETGVPSRFSGSGSGTDFTFTISSLQPEDIATYFCQHFDHLPLAFGGGTKVEIKRTVAAPSVFIFPPSDEQLKSGTASVVCLLNNFYPREAKVQWKVDNALQSGNSQESVTEQDSKDSTYSLSSTLTLSKADYEKHKVYACEVTHQGLSSPVTKSFNRGEC

SEQ ID NO: 71 - protein, 310 aa, Artificial Sequence; identical to SEQ ID NO: 1
  Synthetic construct

SEQ ID NO: 72 - protein, 451 aa, Artificial Sequence
  Synthetic construct
QVQLVQSGAEVKKPGASVKVSCKASGYTFTSHWMHWVRQAPGQGLEWIGEFNPSNGRTNYNEKFKSKATMTVDTSTNTAYMELSSLRSEDTAVYYCASRDYDYDGRYFDYWGQGTLVTVSSASTKGPSVFPLAPSSKSTSGGTAALGCLVKDYFPEPVTVSWNSGALTSGVHTFPAVLQSSGLYSLSSVVTVPSSSLGTQTYICNVNHKPSNTKVDKKVEPKSCDKTHTCPPCPAPELLGGPSVFLFPPKPKDTLMISRTPEVTCVVVDVSHEDPEVKFNWYVDGVEVHNAKTKPREEQYNSTYRVVSVLTVLHQDWLNGKEYKCKVSNKALPAPIEKTISKAKGQPREPQVYTLPPSRDELTKNQVSLSCAVKGFYPSDIAVEWESNGQPENNYKTTPPVLDSDGSFFLVSKLTVDKSRWQQGNVFSCSVMHEALHNHYTQKSLSLSPGK

SEQ ID NO: 73 - protein, 213 aa, Artificial Sequence
  Synthetic construct
DIQMTQSPSSLSASVGDRVTITCSASSSVTYMYWYQQKPGKAPKLLIYDTSNLASGVPSRFSGSGSGTDYTFTISSLQPEDIATYYCQQWSSHIFTFGQGTKVEIKRTVAAPSVFIFPPSDEQLKSGTASVVCLLNNFYPREAKVQWKVDNALQSGNSQESVTEQDSKDSTYSLSSTLTLSKADYEKHKVYACEVTHQGLSSPVTKSFNRGEC

SEQ ID NO: 74 - protein, 310 aa, Artificial Sequence; identical to SEQ ID NO: 1
  Synthetic construct

SEQ ID NO: 75 - protein, 466 aa, Artificial Sequence
  Synthetic construct
QVQLQQSGAEVKKPGSSVKVSCKASGYTFTNYYIYWVRQAPGQGLEWIGGINPTSGGSNFNEKFKTRVTITVDESTNTAYMELSSLRSEDTAFYFCARQGLWFDSDGRGFDFWGQGSTVTVSSASTKGPSVFPLAPSSKSTSGGTAALGCLVKDYFPEPVTVSWNSGALTSGVHTFPAVLQSSGLYSLSSVVTVPSSSLGTQTYICNVNHKPSNTKVDKKVEPKSCDKTHTCPPCPAPELLGGPSVFLFPPKPKDTLMISRTPEVTCVVVDVSHEDPEVKFNWYVDGVEVHNAKTKPREEQYGSTYRVVSVLTVLHQDWLNGKEYKCKVSNKALPAPIEKTISKAKGQPREPQVYTLPPSRDELTKNQVSLSCAVKGFYPSDIAVEWESNGQPENNYKTTPPVLDSDGSFFLVSKLTVDKSRWQQGNVFSCSVMHEALHNHYTQKSLSLSPGKGGSGAWSHPQFEK

SEQ ID NO: 76 - protein, 230 aa, Artificial Sequence
  Synthetic construct
DIQMTQSPSSLSASVGDRVTITCRSSQNIVHSNGNTYLDWYQQTPGKAPKLLIYKVSNRFSGVPSRFSGSGSGTDFTFTISSLQPEDIATYYCFQYSHVPWTFGQGTKLQITREVAAPSVFIFPPSDEQLKSGTASVVCLLNNFYPREAKVQWKVDNALQSGNSQESVTEQDSKDSTYSLSSTLTLSKADYEKHKVYACEVTHQGLSSPVTKSFNRGECGGSDYKDDDDK

SEQ ID NO: 77 - protein, 310 aa, Artificial Sequence; identical to SEQ ID NO: 1
  Synthetic construct

SEQ ID NO: 78 - protein, 459 aa, Artificial Sequence
  Synthetic construct
QVQLQESGPGLVKPSQTLSLTCTVSGYSISSDFAWNWIRQPPGKGLEWMGYISYSGNTRYQPSLKSRITISRDTSKNQFFLKLNSVTAADTATYYCVTAGRGFPYWGQGTLVTVSSASTKGPSVFPLAPSSKSTSGGTAALGCLVKDYFPEPVTVSWNSGALTSGVHTFPAVLQSSGLYSLSSVVTVPSSSLGTQTYICNVNHKPSNTKVDKKVEPKSCDKTHTCPPCPAPELLGGPSVFLFPPKPKDTLMISRTPEVTCVVVDVSHEDPEVKFNWYVDGVEVHNAKTKPREEQYGSTYRVVSVLTVLHQDWLNGKEYKCKVSNKALPAPIEKTISKAKGQPREPQVYTLPPSRDELTKNQVSLSCAVKGFYPSDIAVEWESNGQPENNYKTTPPVLDSDGSFFLVSKLTVDKSRWQQGNVFSCSVMHEALHNHYTQKSLSLSPGKGGSGAWSHPQFEK

SEQ ID NO: 79 - protein, 225 aa, Artificial Sequence
  Synthetic construct
DIQMTQSPSSMSVSVGDRVTITCHSSQDINSNIGWLQQKPGKSFKGLIYHGTNLDDGVPSRFSGSGSGTDYTLTISSLQPEDFATYYCVQYAQFPWTFGGGTKLEIKRTVAAPSVFIFPPSDEQLKSGTASVVCLLNNFYPREAKVQWKVDNALQSGNSQESVTEQDSKDSTYSLSSTLTLSKADYEKHKVYACEVTHQGLSSPVTKSFNRGECGGSDYKDDDDK

SEQ ID NO: 80 - protein, 314 aa, Artificial Sequence
  Synthetic construct
FPMFKRGRCLCIGPGVKAVKVADIEKASIMYPSNNCDKIEVIITLKENKGQRCLNPKSKQARLIIKKVERKNFEPKSCDKTHTCPPCPAPELLGGPSVFLFPPKPKDTLMISRTPEVTCVVVDVSHEDPEVKFNWYVDGVEVHNAKTKPREEQYGSTYRVVSVLTVLHQDWLNGKEYKCKVSNKALPAPIEKTISKAKGQPREPQVYTLPPSRDELTKNQVSLWCLVKGFYPSDIAVEWESNGQPENNYKTTPPVLDSDGSFFLYSKLTVDKSRWQQGNVFSCSVMHEALHNHYTQKSLSLSPGKGGSHHHHHH

SEQ ID NO: 81 - protein, 466 aa, Artificial Sequence; identical to SEQ ID NO: 2
  Synthetic construct

SEQ ID NO: 82 - protein, 214 aa, Artificial Sequence; identical to SEQ ID NO: 40
  Synthetic construct

SEQ ID NO: 83 - protein, 314 aa, Artificial Sequence; identical to SEQ ID NO: 80
  Synthetic construct

SEQ ID NO: 84 - protein, 462 aa, Artificial Sequence; identical to SEQ ID NO: 38
  Synthetic construct

SEQ ID NO: 85 - protein, 214 aa, Artificial Sequence; identical to SEQ ID NO: 39
  Synthetic construct

SEQ ID NO: 86 - protein, 315 aa, Artificial Sequence
  Synthetic construct
GDTLGASWHRPDKCCLGYQKRPLPQVLLSSWYPTSQLCSKPGVIFLTKRGRQVCADKSKDWVKKLMQQLPVTAREPKSCDKTHTCPPCPAPELLGGPSVFLFPPKPKDTLMISRTPEVTCVVVDVSHEDPEVKFNWYVDGVEVHNAKTKPREEQYGSTYRVVSVLTVLHQDWLNGKEYKCKVSNKALPAPIEKTISKAKGQPREPQVYTLPPSRDELTKNQVSLWCLVKGFYPSDIAVEWESNGQPENNYKTTPPVLDSDGSFFLYSKLTVDKSRWQQGNVFSCSVMHEALHNHYTQKSLSLSPGKGGSHHHHHH

SEQ ID NO: 87 - protein, 466 aa, Artificial Sequence; identical to SEQ ID NO: 2
  Synthetic construct

SEQ ID NO: 88 - protein, 214 aa, Artificial Sequence; identical to SEQ ID NO: 40
  Synthetic construct

SEQ ID NO: 89 - protein, 315 aa, Artificial Sequence; identical to SEQ ID NO: 86
  Synthetic construct

SEQ ID NO: 90 - protein, 462 aa, Artificial Sequence; identical to SEQ ID NO: 38
  Synthetic construct

SEQ ID NO: 91 - protein, 214 aa, Artificial Sequence; identical to SEQ ID NO: 39
  Synthetic construct

SEQ ID NO: 92 - protein, 310 aa, Artificial Sequence; identical to SEQ ID NO: 1
  Synthetic construct

SEQ ID NO: 93 - protein, 467 aa, Artificial Sequence
  Synthetic construct
EVQLVESGGGLVQPGGSLRLSCAASGFTFTDYTMDWVRQAPGKGLEWVADVNPNSGGSIYNQRFKGRFTLSVDRSKNTLYLQMNSLRAEDTAVYYCARNLGPSFYFDYWGQGTLVTVSSASTKGPSVFPLAPSSKSTSGGTAALGCLVKDYFPEPVTVSWNSGALTSGVHTFPAVLQSSGLYSLSSVVTVPSSSLGTQTYICNVNHKPSNTKVDKKVEPKSCEPKSCDKTHTCPPCPAPELLGGPSVFLFPPKPKDTLMISRTPEVTCVVVDVSHEDPEVKFNWYVDGVEVHNAKTKPREEQYGSTYRVVSVLTVLHQDWLNGKEYKCKVSNKALPAPIEKTISKAKGQPREPQVYTLPPSRDELTKNQVSLSCAVKGFYPSDIAVEWESNGQPENNYKTTPPVLDSDGSFFLVSKLTVDKSRWQQGNVFSCSVMHEALHNHYTQKSLSLSPGKGGSGAWSHPQFEK

SEQ ID NO: 94 - protein, 214 aa, Artificial Sequence
  Synthetic construct
DIQMTQSPSSLSASVGDRVTITCKASQDVSIGVAWYQQKPGKAPKLLIYSASYRYTGVPSRFSGSGSGTDFTLTISSLQPEDFATYYCQQYYIYPYTFGQGTKVEIKRTVAAPSVFIFPPSDEQLKSGTASVVCLLNNFYPREAKVQWKVDNALQSGNSQESVTEQDSKDSTYSLSSTLTLSKADYEKHKVYACEVTHQGLSSPVTKSFNRGEC

SEQ ID NO: 95 - protein, 310 aa, Artificial Sequence; identical to SEQ ID NO: 1
  Synthetic construct

SEQ ID NO: 96 - protein, 466 aa, Artificial Sequence
  Synthetic construct
EVQLVESGGGLVQPGGSLRLSCAASGYTFTNYGMNWVRQAPGKGLEWVGWINTYTGEPTYAADFKRRFTFSLDTSKSTAYLQMNSLRAEDTAVYYCAKYPHYYGSSHWYFDVWGQGTLVTVSSASTKGPSVFPLAPSSKSTSGGTAALGCLVKDYFPEPVTVSWNSGALTSGVHTFPAVLQSSGLYSLSSVVTVPSSSLGTQTYICNVNHKPSNTKVDKKVEPKSCDKTHTCPPCPAPELLGGPSVFLFPPKPKDTLMISRTPEVTCVVVDVSHEDPEVKFNWYVDGVEVHNAKTKPREEQYGSTYRVVSVLTVLHQDWLNGKEYKCKVSNKALPAPIEKTISKAKGQPREPQVYTLPPSRDELTKNQVSLSCAVKGFYPSDIAVEWESNGQPENNYKTTPPVLDSDGSFFLVSKLTVDKSRWQQGNVFSCSVMHEALHNHYTQKSLSLSPGKGGSGAWSHPQFEK

SEQ ID NO: 97 - protein, 216 aa, Artificial Sequence
  Synthetic construct
ASDIQMTQSPSSLSASVGDRVTITCSASQDISNYLNWYQQKPGKAPKVLIYFTSSLHSGVPSRFSGSGSGTDFTLTISSLQPEDFATYYCQQYSTVPWTFGQGTKVEIKRTVAAPSVFIFPPSDEQLKSGTASVVCLLNNFYPREAKVQWKVDNALQSGNSQESVTEQDSKDSTYSLSSTLTLSKADYEKHKVYACEVTHQGLSSPVTKSFNRGEC

SEQ ID NO: 98 - protein, 310 aa, Artificial Sequence; identical to SEQ ID NO: 1
  Synthetic construct

SEQ ID NO: 99 - protein, 464 aa, Artificial Sequence
  Synthetic construct
EVQLVESGGGLVQPGRSLRLSCAASGFTFDDYAMHWVRQAPGKGLEWVSAITWNSGHIDYADSVEGRFTISRDNAKNSLYLQMNSLRAEDTAVYYCAKVSYLSTASSLDYWGQGTLVTVSSASTKGPSVFPLAPSSKSTSGGTAALGCLVKDYFPEPVTVSWNSGALTSGVHTFPAVLQSSGLYSLSSVVTVPSSSLGTQTYICNVNHKPSNTKVDKKVEPKSCDKTHTCPPCPAPELLGGPSVFLFPPKPKDTLMISRTPEVTCVVVDVSHEDPEVKFNWYVDGVEVHNAKTKPREEQYGSTYRVVSVLTVLHQDWLNGKEYKCKVSNKALPAPIEKTISKAKGQPREPQVYTLPPSRDELTKNQVSLSCAVKGFYPSDIAVEWESNGQPENNYKTTPPVLDSDGSFFLVSKLTVDKSRWQQGNVFSCSVMHEALHNHYTQKSLSLSPGKGGSGAWSHPQFEK

SEQ ID NO: 100 - protein, 214 aa, Artificial Sequence
  Synthetic construct
DIQMTQSPSSLSASVGDRVTITCRASQGIRNYLAWYQQKPGKAPKLLIYAASTLQSGVPSRFSGSGSGTDFTLTISSLQPEDVATYYCQRYNRAPYTFGQGTKVEIKRTVAAPSVFIFPPSDEQLKSGTASVVCLLNNFYPREAKVQWKVDNALQSGNSQESVTEQDSKDSTYSLSSTLTLSKADYEKHKVYACEVTHQGLSSPVTKSFNRGEC

SEQ ID NO: 101 - protein, 571 aa, Artificial Sequence
  Synthetic construct
KPVSLSYRCPCRFFESHVARANVKHLKILNTPNCALQIVARLKNNNRQVCIDPKLKWIQEYLEKALNKRFKMPWDKTHTGGSGSAGGLNDIFEAQKIEWHESSNSEVQLVESGGGLVQPGGSLRLSCAASGFTFSDSWIHWVRQAPGKGLEWVAWISPYGGSTYYADSVKGRFTISADTSKNTAYLQMNSLRAEDTAVYYCARRHWPGGFDYWGQGTLVTVSSASTKGPSVFPLAPSSKSTSGGTAALGCLVKDYFPEPVTVSWNSGALTSGVHTFPAVLQSSGLYSLSSVVTVPSSSLGTQTYICNVNHKPSNTKVDKKVEPKSCEPKSCDKTHTCPPCPAPELLGGPSVFLFPPKPKDTLMISRTPEVTCVVVDVSHEDPEVKFNWYVDGVEVHNAKTKPREEQYGSTYRVVSVLTVLHQDWLNGKEYKCKVSNKALPAPIEKTISKAKGQPREPQVYTLPPSRDELTKNQVSLSCAVKGFYPSDIAVEWESNGQPENNYKTTPPVLDSDGSFFLVSKLTVDKSRWQQGNVFSCSVMHEALHNHYTQKSLSLSPGKGGSGAWSHPQFEK

SEQ ID NO: 102 - protein, 214 aa, Artificial Sequence; identical to SEQ ID NO: 40
  Synthetic construct

SEQ ID NO: 103 - protein, 466 aa, Artificial Sequence; identical to SEQ ID NO: 2
  Synthetic construct

SEQ ID NO: 104 - protein, 319 aa, Artificial Sequence
  Synthetic construct
KPVSLSYRCPCRFFESHVARANVKHLKILNTPNCALQIVARLKNNNRQVCIDPKLKWIQEYLEKALNKRFKMPWDKTHTGGSGSAGGLNDIFEAQKIEWHESSNSDIQMTQSPSSLSASVGDRVTITCRASQDVSTAVAWYQQKPGKAPKLLIYSASFLYSGVPSRFSGSGSGTDFTLTISSLQPEDFATYYCQQYLYHPATFGQGTKVEIKRTVAAPSVFIFPPSDEQLKSGTASVVCLLNNFYPREAKVQWKVDNALQSGNSQESVTEQDSKDSTYSLSSTLTLSKADYEKHKVYACEVTHQGLSSPVTKSFNRGEC

SEQ ID NO: 105 - protein, 368 aa, Artificial Sequence; identical to SEQ ID NO: 34
  Synthetic construct

SEQ ID NO: 106 - protein, 467 aa, Artificial Sequence; identical to SEQ ID NO: 93
  Synthetic construct

SEQ ID NO: 107 - protein, 214 aa, Artificial Sequence; identical to SEQ ID NO: 94
  Synthetic construct

SEQ ID NO: 108 - protein, 368 aa, Artificial Sequence; identical to SEQ ID NO: 34
  Synthetic construct

SEQ ID NO: 109 - protein, 461 aa, Artificial Sequence; identical to SEQ ID NO: 60
  Synthetic construct

SEQ ID NO: 110 - protein, 214 aa, Artificial Sequence; identical to SEQ ID NO: 61
  Synthetic construct

SEQ ID NO: 111 - protein, 368 aa, Artificial Sequence; identical to SEQ ID NO: 34
  Synthetic construct

SEQ ID NO: 112 - protein, 466 aa, Artificial Sequence; identical to SEQ ID NO: 75
  Synthetic construct

SEQ ID NO: 113 - protein, 230 aa, Artificial Sequence; identical to SEQ ID NO: 76
  Synthetic construct

SEQ ID NO: 114 - protein, 368 aa, Artificial Sequence; identical to SEQ ID NO: 34
  Synthetic construct

SEQ ID NO: 115 - protein, 451 aa, Artificial Sequence; identical to SEQ ID NO: 66
  Synthetic construct

SEQ ID NO: 116 - protein, 214 aa, Artificial Sequence; identical to SEQ ID NO: 67
  Synthetic construct

SEQ ID NO: 117 - protein, 368 aa, Artificial Sequence; identical to SEQ ID NO: 34
  Synthetic construct

SEQ ID NO: 118 - protein, 451 aa, Artificial Sequence; identical to SEQ ID NO: 72
  Synthetic construct

SEQ ID NO: 119 - protein, 213 aa, Artificial Sequence; identical to SEQ ID NO: 73
  Synthetic construct

SEQ ID NO: 120 - protein, 368 aa, Artificial Sequence; identical to SEQ ID NO: 34
  Synthetic construct

SEQ ID NO: 121 - protein, 459 aa, Artificial Sequence; identical to SEQ ID NO: 78
  Synthetic construct

SEQ ID NO: 122 - protein, 225 aa, Artificial Sequence; identical to SEQ ID NO: 79
  Synthetic construct

SEQ ID NO: 123 - protein, 368 aa, Artificial Sequence; identical to SEQ ID NO: 34
  Synthetic construct

SEQ ID NO: 124 - protein, 449 aa, Artificial Sequence; identical to SEQ ID NO: 69
  Synthetic construct

SEQ ID NO: 125 - protein, 214 aa, Artificial Sequence; identical to SEQ ID NO: 70
  Synthetic construct

SEQ ID NO: 126 - protein, 368 aa, Artificial Sequence; identical to SEQ ID NO: 34
  Synthetic construct

SEQ ID NO: 127 - protein, 466 aa, Artificial Sequence; identical to SEQ ID NO: 96
  Synthetic construct

SEQ ID NO: 128 - protein, 216 aa, Artificial Sequence; identical to SEQ ID NO: 97
  Synthetic construct

SEQ ID NO: 129 - protein, 368 aa, Artificial Sequence; identical to SEQ ID NO: 34
  Synthetic construct

SEQ ID NO: 130 - protein, 464 aa, Artificial Sequence; identical to SEQ ID NO: 99
  Synthetic construct

SEQ ID NO: 131 - protein, 214 aa, Artificial Sequence; identical to SEQ ID NO: 100
  Synthetic construct

SEQ ID NO: 132 - protein, 358 aa, Artificial Sequence
  Synthetic construct
MRLIFGALIIFLAYVYHYEVNGTELRCRCLHRKWPPNKIILGNYWLHRDPRGPGCDKNEHLLYPDGRKPPGPGVCLSPDHLFSKWLDKHNDNRWYNVNITKSPGPRRINITLIGVRGEPKSCDKTHTCPPCPAPELLGGPSVFLFPPKPKDTLMISRTPEVTCVVVDVSHEDPEVKFNWYVDGVEVHNAKTKPREEQYGSTYRVVSVLTVLHQDWLNGKEYKCKVSNKALPAPIEKTISKAKGQPREPQVYTLPPSRDELTKNQVSLWCLVKGFYPSDIAVEWESNGQPENNYKTTPPVLDSDGSFFLYSKLTVDKSRWQQGNVFSCSVMHEALHNHYTQKSLSLSPGKGGSHHHHHH

SEQ ID NO: 133 - protein, 466 aa, Artificial Sequence; identical to SEQ ID NO: 96
  Synthetic construct

SEQ ID NO: 134 - protein, 214 aa, Artificial Sequence
  Synthetic construct
DIQMTQSPSSLSASVGDRVTITCSASQDISNYLNWYQQKPGKAPKVLIYFTSSLHSGVPSRFSGSGSGTDFTLTISSLQPEDFATYYCQQYSTVPWTFGQGTKVEIKRTVAAPSVFIFPPSDEQLKSGTASVVCLLNNFYPREAKVQWKVDNALQSGNSQESVTEQDSKDSTYSLSSTLTLSKADYEKHKVYACEVTHQGLSSPVTKSFNRGEC

SEQ ID NO: 135 - protein, 315 aa, Artificial Sequence; identical to SEQ ID NO: 86
  Synthetic construct

SEQ ID NO: 136 - protein, 338 aa, Artificial Sequence
  Synthetic construct
MAIGFICSSPDAELFSEKSRMSSSVLLGCLLCCMDWSAAVPGKTEPFRKLFDAIMIKKLKSCSAAYPSDLDEGSMCDMADASPTSLELGLSKLDKESEPKSCDKTHTCPPCPAPELLGGPSVFLFPPKPKDTLMISRTPEVTCVVVDVSHEDPEVKFNWYVDGVEVHNAKTKPREEQYGSTYRVVSVLTVLHQDWLNGKEYKCKVSNKALPAPIEKTISKAKGQPREPQVYTLPPSRDELTKNQVSLWCLVKGFYPSDIAVEWESNGQPENNYKTTPPVLDSDGSFFLYSKLTVDKSRWQQGNVFSCSVMHEALHNHYTQKSLSLSPGKGGSHHHHHH

SEQ ID NO: 137 - protein, 374 aa, Artificial Sequence
  Synthetic construct
APMTQTTPLKTSWVNCSNMIDEIITHLKQPPLPLLDFNNLNGEDQDILMENNLRRPNLEAFNRAVKSLQNASAIESILKNLLPCLPLATAAPTRHPIHIKDGDWNEFRRKLTFYLKTLENAQAQQTTLSLAIFEPKSCDKTHTCPPCPAPELLGGPSVFLFPPKPKDTLMISRTPEVTCVVVDVSHEDPEVKFNWYVDGVEVHNAKTKPREEQYGSTYRVVSVLTVLHQDWLNGKEYKCKVSNKALPAPIEKTISKAKGQPREPQVYTLPPSRDELTKNQVSLWCLVKGFYPSDIAVEWESNGQPENNYKTTPPVLDSDGSFFLYSKLTVDKSRWQQGNVFSCSVMHEALHNHYTQKSLSLSPGKGGSHHHHHH

SEQ ID NO: 138 - protein, 370 aa, Artificial Sequence
  Synthetic construct
HKCDITLQEIIKTLNSLTEQKTLCTELTVTDIFAASKNTTEKETFCRAATVLRQFYSHHEKDTRCLGATAQQFHRHKQLIRFLKRLDRNLWGLAGLNSCPVKEANQSTLENFLERLKTIMREKYSKCSSEPKSCDKTHTCPPCPAPELLGGPSVFLFPPKPKDTLMISRTPEVTCVVVDVSHEDPEVKFNWYVDGVEVHNAKTKPREEQYGSTYRVVSVLTVLHQDWLNGKEYKCKVSNKALPAPIEKTISKAKGQPREPQVYTLPPSRDELTKNQVSLWCLVKGFYPSDIAVEWESNGQPENNYKTTPPVLDSDGSFFLYSKLTVDKSRWQQGNVFSCSVMHEALHNHYTQKSLSLSPGKGGSHHHHHH

SEQ ID NO: 139 - protein, 356 aa, Artificial Sequence
  Synthetic construct
IPTEIPTSALVKETLALLSTHRTLLIANETLRIPVPVHKNHQLCTEEIFQGIGTLESQTVQGGTVERLFKNLSLIKKYIDGQKKKCGEERRRVNQFLDYLQEFLGVMNTEWIIESEPKSCDKTHTCPPCPAPELLGGPSVFLFPPKPKDTLMISRTPEVTCVVVDVSHEDPEVKFNWYVDGVEVHNAKTKPREEQYGSTYRVVSVLTVLHQDWLNGKEYKCKVSNKALPAPIEKTISKAKGQPREPQVYTLPPSRDELTKNQVSLWCLVKGFYPSDIAVEWESNGQPENNYKTTPPVLDSDGSFFLYSKLTVDKSRWQQGNVFSCSVMHEALHNHYTQKSLSLSPGKGGSHHHHHH

SEQ ID NO: 140 - protein, 424 aa, Artificial Sequence
  Synthetic construct
VPPGEDSKDVAAPHRQPLTSSERIDKQIRYILDGISALRKETCNKSNMCESSKEALAENNLNLPKMAEKDGCFQSGFNEETCLVKIITGLLEFEVYLEYLQNRFESSEEQARAVQMSTKVLIQFLQKKAKNLDAITTPDPTTNASLLTKLQAQNQWLQDMTTHLILRSFKEFLQSSLRALRQMEPKSCDKTHTCPPCPAPELLGGPSVFLFPPKPKDTLMISRTPEVTCVVVDVSHEDPEVKFNWYVDGVEVHNAKTKPREEQYGSTYRVVSVLTVLHQDWLNGKEYKCKVSNKALPAPIEKTISKAKGQPREPQVYTLPPSRDELTKNQVSLWCLVKGFYPSDIAVEWESNGQPENNYKTTPPVLDSDGSFFLYSKLTVDKSRWQQGNVFSCSVMHEALHNHYTQKSLSLSPGKGGSHHHHHH

SEQ ID NO: 141 - protein, 393 aa, Artificial Sequence
  Synthetic construct
DCDIEGKDGKQYESVLMVSIDQLLDSMKEIGSNCLNNEFNFFKRHICDANKEGMFLFRAARKLRQFLKMNSTGDFDLHLLKVSEGTTILLNCTGQVKGRKPAALGEAQPTKSLEENKSLKEQKKLNDLCFLKRLLQEIKTCWNKILMGTKEHEPKSCDKTHTCPPCPAPELLGGPSVFLFPPKPKDTLMISRTPEVTCVVVDVSHEDPEVKFNWYVDGVEVHNAKTKPREEQYGSTYRVVSVLTVLHQDWLNGKEYKCKVSNKALPAPIEKTISKAKGQPREPQVYTLPPSRDELTKNQVSLWCLVKGFYPSDIAVEWESNGQPENNYKTTPPVLDSDGSFFLYSKLTVDKSRWQQGNVFSCSVMHEALHNHYTQKSLSLSPGKGGSHHHHHH

SEQ ID NO: 142 - protein, 312 aa, Artificial Sequence
  Synthetic construct
AKELRCQCIKTYSKPFHPKFIKELRVIESGPHCANTEIIVKLSDGRELCLDPKENWVQRVVEKFLKRAENSEPKSCDKTHTCPPCPAPELLGGPSVFLFPPKPKDTLMISRTPEVTCVVVDVSHEDPEVKFNWYVDGVEVHNAKTKPREEQYGSTYRVVSVLTVLHQDWLNGKEYKCKVSNKALPAPIEKTISKAKGQPREPQVYTLPPSRDELTKNQVSLWCLVKGFYPSDIAVEWESNGQPENNYKTTPPVLDSDGSFFLYSKLTVDKSRWQQGNVFSCSVMHEALHNHYTQKSLSLSPGKGGSHHHHHH

SEQ ID NO: 143 - protein, 367 aa, Artificial Sequence
  Synthetic construct
QGCPTLAGILDINFLINKMQEDPASKCHCSANVTSCLCLGIPSDNCTRPCFSERLSQMTNTTMQTRYPLIFSRVKKSVEVLKNNKCPYFSCEQPCNQTTAGNALTFLKSLLEIFQKEKMRGMRGKIEPKSCDKTHTCPPCPAPELLGGPSVFLFPPKPKDTLMISRTPEVTCVVVDVSHEDPEVKFNWYVDGVEVHNAKTKPREEQYGSTYRVVSVLTVLHQDWLNGKEYKCKVSNKALPAPIEKTISKAKGQPREPQVYTLPPSRDELTKNQVSLWCLVKGFYPSDIAVEWESNGQPENNYKTTPPVLDSDGSFFLYSKLTVDKSRWQQGNVFSCSVMHEALHNHYTQKSLSLSPGKGGSHHHHHH

SEQ ID NO: 144 - protein, 401 aa, Artificial Sequence
  Synthetic construct
SPGQGTQSENSCTHFPGNLPNMLRDLRDAFSRVKTFFQMKDQLDNLLLKESLLEDFKGYLGCQALSEMIQFYLEEVMPQAENQDPDIKAHVNSLGENLKTLRLRLRRCHRFLPCENKSKAVEQVKNAFNKLQEKGIYKAMSEFDIFINYIEAYMTMKIRNEPKSCDKTHTCPPCPAPELLGGPSVFLFPPKPKDTLMISRTPEVTCVVVDVSHEDPEVKFNWYVDGVEVHNAKTKPREEQYGSTYRVVSVLTVLHQDWLNGKEYKCKVSNKALPAPIEKTISKAKGQPREPQVYTLPPSRDELTKNQVSLWCLVKGFYPSDIAVEWESNGQPENNYKTTPPVLDSDGSFFLYSKLTVDKSRWQQGNVFSCSVMHEALHNHYTQKSLSLSPGKGGSHHHHHH

SEQ ID NO: 145 - protein, 419 aa, Artificial Sequence
  Synthetic construct
PGPPPGPPRVSPDPRAELDSTVLLTRSLLADTRQLAAQLRDKFPADGDHNLDSLPTLAMSAGALGALQLPGVLTRLRADLLSYLRHVQWLRRAGGSSLKTLEPELGTLQARLDRLLRRLQLLMSRLALPQPPPDPPAPPLAPPSSAWGGIRAAHAILGGLHLTLDWAVRGLLLLKTRLEPKSCDKTHTCPPCPAPELLGGPSVFLFPPKPKDTLMISRTPEVTCVVVDVSHEDPEVKFNWYVDGVEVHNAKTKPREEQYGSTYRVVSVLTVLHQDWLNGKEYKCKVSNKALPAPIEKTISKAKGQPREPQVYTLPPSRDELTKNQVSLWCLVKGFYPSDIAVEWESNGQPENNYKTTPPVLDSDGSFFLYSKLTVDKSRWQQGNVFSCSVMHEALHNHYTQKSLSLSPGKGGSHHHHHH

SEQ ID NO: 146 - protein, 355 aa, Artificial Sequence
  Synthetic construct
SPGPVPPSTALRELIEELVNITQNQKAPLCNGSMVWSINLTAGMYCAALESLINVSGCSAIEKTQRMLSGFCPHKVSAGQFSSLHVRDTKIEVAQFVKDLLLHLKKLFREGRFNEPKSCDKTHTCPPCPAPELLGGPSVFLFPPKPKDTLMISRTPEVTCVVVDVSHEDPEVKFNWYVDGVEVHNAKTKPREEQYGSTYRVVSVLTVLHQDWLNGKEYKCKVSNKALPAPIEKTISKAKGQPREPQVYTLPPSRDELTKNQVSLWCLVKGFYPSDIAVEWESNGQPENNYKTTPPVLDSDGSFFLYSKLTVDKSRWQQGNVFSCSVMHEALHNHYTQKSLSLSPGKGGSHHHHHH

SEQ ID NO: 147 - protein, 355 aa, Artificial Sequence
  Synthetic construct
NWVNVISDLKKIEDLIQSMHIDATLYTESDVHPSCKVTAMKCFLLELQVISLESGDASIHDTVENLIILANNSLSSNGNVTESGCKECEELEEKNIKEFLQSFVHIVQMFINTSEPKSCDKTHTCPPCPAPELLGGPSVFLFPPKPKDTLMISRTPEVTCVVVDVSHEDPEVKFNWYVDGVEVHNAKTKPREEQYGSTYRVVSVLTVLHQDWLNGKEYKCKVSNKALPAPIEKTISKAKGQPREPQVYTLPPSRDELTKNQVSLWCLVKGFYPSDIAVEWESNGQPENNYKTTPPVLDSDGSFFLYSKLTVDKSRWQQGNVFSCSVMHEALHNHYTQKSLSLSPGKGGSHHHHHH

SEQ ID NO: 148 - protein, 378 aa, Artificial Sequence
  Synthetic construct
IVKAGITIPRNPGCPNSEDKNFPRTVMVNLNIHNRNTNTNPKRSSDYYNRSTSPWNLHRNEDPERYPSVIWEAKCRHLGCINADGNVDYHMNSVPIQQEILVLRREPPHCPNSFRLEKILVSVGCTCVTPIVHHVADEPKSCDKTHTCPPCPAPELLGGPSVFLFPPKPKDTLMISRTPEVTCVVVDVSHEDPEVKFNWYVDGVEVHNAKTKPREEQYGSTYRVVSVLTVLHQDWLNGKEYKCKVSNKALPAPIEKTISKAKGQPREPQVYTLPPSRDELTKNQVSLWCLVKGFYPSDIAVEWESNGQPENNYKTTPPVLDSDGSFFLYSKLTVDKSRWQQGNVFSCSVMHEALHNHYTQKSLSLSPGKGGSHHHHHH

SEQ ID NO: 149 - protein, 466 aa, Artificial Sequence; identical to SEQ ID NO: 96
  Synthetic construct

SEQ ID NO: 150 - protein, 401 aa, Artificial Sequence
  Synthetic construct
QPRSPKSKRKGQGRPGPLAPGPHQVPLDLVSRMKPYARMEEYERNIEEMVAQLRNSSELAQRKCEVNLQLWMSNKRSLSPWGYSINHDPSRIPVDLPEARCLCLGCVNPFTMQEDRSMVSVPVFSQVPVRRRLCPPPPRTGPCRQRAVMETIAVGCTCIFEPKSCDKTHTCPPCPAPELLGGPSVFLFPPKPKDTLMISRTPEVTCVVVDVSHEDPEVKFNWYVDGVEVHNAKTKPREEQYGSTYRVVSVLTVLHQDWLNGKEYKCKVSNKALPAPIEKTISKAKGQPREPQVYTLPPSRDELTKNQVSLWCLVKGFYPSDIAVEWESNGQPENNYKTTPPVLDSDGSFFLYSKLTVDKSRWQQGNVFSCSVMHEALHNHYTQKSLSLSPGKGGSHHHHHH

SEQ ID NO: 151 - protein, 420 aa, Artificial Sequence
  Synthetic construct
HHDPSLRGHPHSHGTPHCYSAEELPLGQAPPHLLARGAKWGQALPVALVSSLEAASHRGRHERPSATTQCPVLRPEEVLEADTHQRSISPWRYRVDTDEDRYPQKLAFAECLCRGCIDARTGRETAALNSVRLLQSLLVLRRRPCSRDGSGLPTPGAFAFHTEFIHVPVGCTCVLPRSVEPKSCDKTHTCPPCPAPELLGGPSVFLFPPKPKDTLMISRTPEVTCVVVDVSHEDPEVKFNWYVDGVEVHNAKTKPREEQYGSTYRVVSVLTVLHQDWLNGKEYKCKVSNKALPAPIEKTISKAKGQPREPQVYTLPPSRDELTKNQVSLWCLVKGFYPSDIAVEWESNGQPENNYKTTPPVLDSDGSFFLYSKLTVDKSRWQQGNVFSCSVMHEALHNHYTQKSLSLSPGKGGSHHHHHH

SEQ ID NO: 152 - protein, 428 aa, Artificial Sequence
  Synthetic construct
AGAPRAGRRPARPRGCADRPEELLEQLYGRLAAGVLSAFHHTLQLGPREQARNASCPAGGRPADRRFRPPTNLRSVSPWAYRISYDPARYPRYLPEAYCLCRGCLTGLFGEEDVRFRSAPVYMPTVVLRRTPACAGGRSVYTEAYVTIPVGCTCVPEPEKDADSINSSIDKQGAKLLLGPNDAPAGPEPKSCDKTHTCPPCPAPELLGGPSVFLFPPKPKDTLMISRTPEVTCVVVDVSHEDPEVKFNWYVDGVEVHNAKTKPREEQYGSTYRVVSVLTVLHQDWLNGKEYKCKVSNKALPAPIEKTISKAKGQPREPQVYTLPPSRDELTKNQVSLWCLVKGFYPSDIAVEWESNGQPENNYKTTPPVLDSDGSFFLYSKLTVDKSRWQQGNVFSCSVMHEALHNHYTQKSLSLSPGKGGSHHHHHH

SEQ ID NO: 153 - protein, 466 aa, Artificial Sequence; identical to SEQ ID NO: 96
  Synthetic construct

SEQ ID NO: 154 - protein, 374 aa, Artificial Sequence
  Synthetic construct
RKIPKVGHTFFQKPESCPPVPGGSMKLDIGIINENQRVSMSRNIESRSTSPWNYTVTWDPNRYPSEVVQAQCRNLGCINAQGKEDISMNSVPIQQETLVVRRKHQGCSVSFQLEKVLVTVGCTCVTPVIHHVQEPKSCDKTHTCPPCPAPELLGGPSVFLFPPKPKDTLMISRTPEVTCVVVDVSHEDPEVKFNWYVDGVEVHNAKTKPREEQYGSTYRVVSVLTVLHQDWLNGKEYKCKVSNKALPAPIEKTISKAKGQPREPQVYTLPPSRDELTKNQVSLWCLVKGFYPSDIAVEWESNGQPENNYKTTPPVLDSDGSFFLYSKLTVDKSRWQQGNVFSCSVMHEALHNHYTQKSLSLSPGKGGSHHHHHH

SEQ ID NO: 155 - protein, 398 aa, Artificial Sequence
  Synthetic construct
YFGKLESKLSVIRNLNDQVLFIDQGNRPLFEDMTDSDCRDNAPRTIFIISMYKDSQPRGMAVTISVKCEKISTLSCENKIISFKEMNPPDNIKDTKSDIIFFQRSVPGHDNKMQFESSSYEGYFLACEKERDLFKLILKKEDELGDRSIMFTVQNEDEPKSCDKTHTCPPCPAPELLGGPSVFLFPPKPKDTLMISRTPEVTCVVVDVSHEDPEVKFNWYVDGVEVHNAKTKPREEQYGSTYRVVSVLTVLHQDWLNGKEYKCKVSNKALPAPIEKTISKAKGQPREPQVYTLPPSRDELTKNQVSLWCLVKGFYPSDIAVEWESNGQPENNYKTTPPVLDSDGSFFLYSKLTVDKSRWQQGNVFSCSVMHEALHNHYTQKSLSLSPGKGGSHHHHHH

SEQ ID NO: 156 - protein, 394 aa, Artificial Sequence
  Synthetic construct
LRRCLISTDMHHIEESFQEIKRAIQAKDTFPNVTILSTLETLQIIKPLDVCCVTKNLLAFYVDRVFKDHQEPNPKILRKISSIANSFLYMQKTLRQCQEQRQCHCRQEATNATRVIHDNYDQLEVHAAAIKSLGELDVFLAWINKNHEVMFSAEPKSCDKTHTCPPCPAPELLGGPSVFLFPPKPKDTLMISRTPEVTCVVVDVSHEDPEVKFNWYVDGVEVHNAKTKPREEQYGSTYRVVSVLTVLHQDWLNGKEYKCKVSNKALPAPIEKTISKAKGQPREPQVYTLPPSRDELTKNQVSLWCLVKGFYPSDIAVEWESNGQPENNYKTTPPVLDSDGSFFLYSKLTVDKSRWQQGNVFSCSVMHEALHNHYTQKSLSLSPGKGGSHHHHHH

SEQ ID NO: 157 - protein, 393 aa, Artificial Sequence
  Synthetic construct
LKTLNLGSCVIATNLQEIRNGFSEIRGSVQAKDGNIDIRILRRTESLQDTKPANRCCLLRHLLRLYLDRVFKNYQTPDHYTLRKISSLANSFLTIKKDLRLCHAHMTCHCGEEAMKKYSQILSHFEKLEPQAAVVKALGELDILLQWMEETEEPKSCDKTHTCPPCPAPELLGGPSVFLFPPKPKDTLMISRTPEVTCVVVDVSHEDPEVKFNWYVDGVEVHNAKTKPREEQYGSTYRVVSVLTVLHQDWLNGKEYKCKVSNKALPAPIEKTISKAKGQPREPQVYTLPPSRDELTKNQVSLWCLVKGFYPSDIAVEWESNGQPENNYKTTPPVLDSDGSFFLYSKLTVDKSRWQQGNVFSCSVMHEALHNHYTQKSLSLSPGKGGSHHHHHH

SEQ ID NO: 158 - protein, 372 aa, Artificial Sequence
  Synthetic construct
QDRHMIRMRQLIDIVDQLKNYVNDLVPEFLPAPEDVETNCEWSAFSCFQKAQLKSANTGNNERIINVSIKKLKRKPPSTNAGRRQKHRLTCPSCDSYEKKPPKEFLERFKSLLQKMIHQHLSSRTHGSEDSEPKSCDKTHTCPPCPAPELLGGPSVFLFPPKPKDTLMISRTPEVTCVVVDVSHEDPEVKFNWYVDGVEVHNAKTKPREEQYGSTYRVVSVLTVLHQDWLNGKEYKCKVSNKALPAPIEKTISKAKGQPREPQVYTLPPSRDELTKNQVSLWCLVKGFYPSDIAVEWESNGQPENNYKTTPPVLDSDGSFFLYSKLTVDKSRWQQGNVFSCSVMHEALHNHYTQKSLSLSPGKGGSHHHHHH

SEQ ID NO: 159 - protein, 387 aa, Artificial Sequence
  Synthetic construct
APISSHCRLDKSNFQQPYITNRTFMLAKEASLADNNTDVRLIGEKLFHGVSMSERCYLMKQVLNFTLEEVLFPQSDRFQPYMQEVVPFLARLSNRLSTCHIEGDDLHIQRNVQKLKDTVKKLGESGEIKAIGELDLLFMSLRNACIEPKSCDKTHTCPPCPAPELLGGPSVFLFPPKPKDTLMISRTPEVTCVVVDVSHEDPEVKFNWYVDGVEVHNAKTKPREEQYGSTYRVVSVLTVLHQDWLNGKEYKCKVSNKALPAPIEKTISKAKGQPREPQVYTLPPSRDELTKNQVSLWCLVKGFYPSDIAVEWESNGQPENNYKTTPPVLDSDGSFFLYSKLTVDKSRWQQGNVFSCSVMHEALHNHYTQKSLSLSPGKGGSHHHHHH

SEQ ID NO: 160 - protein, 396 aa, Artificial Sequence
  Synthetic construct
QEFHFGPCQVKGVVPQKLWEAFWAVKDTMQAQDNITSARLLQQEVLQNVSDAESCYLVHTLLEFYLKTVFKNYHNRTVEVRTLKSFSTLANNFVLIVSQLQPSQENEMFSIRDSAHRRFLLFRRAFKQLDVEAALTKALGEVDILLTWMQKFYKLEPKSCDKTHTCPPCPAPELLGGPSVFLFPPKPKDTLMISRTPEVTCVVVDVSHEDPEVKFNWYVDGVEVHNAKTKPREEQYGSTYRVVSVLTVLHQDWLNGKEYKCKVSNKALPAPIEKTISKAKGQPREPQVYTLPPSRDELTKNQVSLWCLVKGFYPSDIAVEWESNGQPENNYKTTPPVLDSDGSFFLYSKLTVDKSRWQQGNVFSCSVMHEALHNHYTQKSLSLSPGKGGSHHHHHH

SEQ ID NO: 161 - protein, 386 aa, Artificial Sequence
  Synthetic construct
YSHWPSCCPSKGQDTSEELLRWSTVPVPPLEPARPNRHPESCRASEDGPLNSRAISPWRYELDRDLNRLPQDLYHARCLCPHCVSLQTGSHMDPRGNSELLYHNQTVFYRRPCHGEKGTHKGYCLERRLYRVSLACVCVRPRVMGEPKSCDKTHTCPPCPAPELLGGPSVFLFPPKPKDTLMISRTPEVTCVVVDVSHEDPEVKFNWYVDGVEVHNAKTKPREEQYGSTYRVVSVLTVLHQDWLNGKEYKCKVSNKALPAPIEKTISKAKGQPREPQVYTLPPSRDELTKNQVSLWCLVKGFYPSDIAVEWESNGQPENNYKTTPPVLDSDGSFFLYSKLTVDKSRWQQGNVFSCSVMHEALHNHYTQKSLSLSPGKGGSHHHHHH

SEQ ID NO: 162 - protein, 391 aa, Artificial Sequence
  Synthetic construct
KHKQSSFTKSCYPRGTLSQAVDALYIKAAWLKATIPEDRIKNIRLLKKKTKKQFMKNCQFQEQLLSFFMEDVFGQLQLQGCKKIRFVEDFHSLRQKLSHCISCASSAREMKSITRMKRIFYRIGNKGIYKAISELDILLSWIKKLLESSQEPKSCDKTHTCPPCPAPELLGGPSVFLFPPKPKDTLMISRTPEVTCVVVDVSHEDPEVKFNWYVDGVEVHNAKTKPREEQYGSTYRVVSVLTVLHQDWLNGKEYKCKVSNKALPAPIEKTISKAKGQPREPQVYTLPPSRDELTKNQVSLWCLVKGFYPSDIAVEWESNGQPENNYKTTPPVLDSDGSFFLYSKLTVDKSRWQQGNVFSCSVMHEALHNHYTQKSLSLSPGKGGSHHHHHH

SEQ ID NO: 163 - protein, 416 aa, Artificial Sequence
  Synthetic construct
VPVARLHGALPDARGCHIAQFKSLSPQELQAFKRAKDALEESLLLKDCRCHSRLFPRTWDLRQLQVRERPMALEAELALTLKVLEATADTDPALVDVLDQPLHTLHHILSQFRACIQPQPTAGPRTRGRLHHWLYRLQEAPKKESPGCLEASVTFNLFRLLTRDLNCVASGDLCVEPKSCDKTHTCPPCPAPELLGGPSVFLFPPKPKDTLMISRTPEVTCVVVDVSHEDPEVKFNWYVDGVEVHNAKTKPREEQYGSTYRVVSVLTVLHQDWLNGKEYKCKVSNKALPAPIEKTISKAKGQPREPQVYTLPPSRDELTKNQVSLWCLVKGFYPSDIAVEWESNGQPENNYKTTPPVLDSDGSFFLYSKLTVDKSRWQQGNVFSCSVMHEALHNHYTQKSLSLSPGKGGSHHHHHH

SEQ ID NO: 164 - protein, 382 aa, Artificial Sequence
  Synthetic construct
SHTLPVRLLRPSDDVQKIVEELQSLSKMLLKDVEEEKGVLVSQNYTLPCLSPDAQPPNNIHSPAIRAYLKTIRQLDNKSVIDEIIEHLDKLIFQDAPETNISVPTDTHECKRFILTISQQFSECMDLALKSLTSGAQQATTEPKSCDKTHTCPPCPAPELLGGPSVFLFPPKPKDTLMISRTPEVTCVVVDVSHEDPEVKFNWYVDGVEVHNAKTKPREEQYGSTYRVVSVLTVLHQDWLNGKEYKCKVSNKALPAPIEKTISKAKGQPREPQVYTLPPSRDELTKNQVSLWCLVKGFYPSDIAVEWESNGQPENNYKTTPPVLDSDGSFFLYSKLTVDKSRWQQGNVFSCSVMHEALHNHYTQKSLSLSPGKGGSHHHHHH

SEQ ID NO: 165 - protein, 372 aa, Artificial Sequence
  Synthetic construct
MCFPKVLSDDMKKLKARMHQAIERFYDKMQNAESGRGQVMSSLAELEDDFKEGYLETVAAYYEEQHPELTPLLEKERDGLRCRGNRSPVPDVEDPATEEPGESFCDKSYGAPRGDKEELTPQKCSEPQSSKEPKSCDKTHTCPPCPAPELLGGPSVFLFPPKPKDTLMISRTPEVTCVVVDVSHEDPEVKFNWYVDGVEVHNAKTKPREEQYGSTYRVVSVLTVLHQDWLNGKEYKCKVSNKALPAPIEKTISKAKGQPREPQVYTLPPSRDELTKNQVSLWCLVKGFYPSDIAVEWESNGQPENNYKTTPPVLDSDGSFFLYSKLTVDKSRWQQGNVFSCSVMHEALHNHYTQKSLSLSPGKGGSHHHHHH

SEQ ID NO: 166 - protein, 400 aa, Artificial Sequence
  Synthetic construct
SITGISPITEYLASLSTYNDQSITFALEDESYEIYVEDLKKDEKKDKVLLSYYESQHPSNESGDGVDGKMLMVTLSPTKDFWLHANNKEHSVELHKCEKPLPDQAFFVLHNMHSNCVSFECKTDPGVFIGVKDNHLALIKVDSSENLCTENILFKLSETEPKSCDKTHTCPPCPAPELLGGPSVFLFPPKPKDTLMISRTPEVTCVVVDVSHEDPEVKFNWYVDGVEVHNAKTKPREEQYGSTYRVVSVLTVLHQDWLNGKEYKCKVSNKALPAPIEKTISKAKGQPREPQVYTLPPSRDELTKNQVSLWCLVKGFYPSDIAVEWESNGQPENNYKTTPPVLDSDGSFFLYSKLTVDKSRWQQGNVFSCSVMHEALHNHYTQKSLSLSPGKGGSHHHHHH

SEQ ID NO: 167 - protein, 463 aa, Artificial Sequence
  Synthetic construct
NEPLEMWPLTQNEECTVTGFLRDKLQYRSRLQYMKHYFPINYKISVPYEGVFRIANVTRLQRAQVSERELRYLWVLVSLSATESVQDVLLEGHPSWKYLQEVETLLLNVQQGLTDVEVSPKVESVLSLLNAPGPNLKLVRPKALLDNCFRVMELLYCSCCKQSSVLNWQDCEVPSPQSCSPEPSLQYAATQLYPPPPWSPSSPPHSTGSVRPVRAQGEGLLPEPKSCDKTHTCPPCPAPELLGGPSVFLFPPKPKDTLMISRTPEVTCVVVDVSHEDPEVKFNWYVDGVEVHNAKTKPREEQYGSTYRVVSVLTVLHQDWLNGKEYKCKVSNKALPAPIEKTISKAKGQPREPQVYTLPPSRDELTKNQVSLWCLVKGFYPSDIAVEWESNGQPENNYKTTPPVLDSDGSFFLYSKLTVDKSRWQQGNVFSCSVMHEALHNHYTQKSLSLSPGKGGSHHHHHH

SEQ ID NO: 168 - protein, 394 aa, Artificial Sequence
  Synthetic construct
KIDTPQQGSIQDINHRVWVLQDQTLIAVPRKDRMSPVTIALISCRHVETLEKDRGNPIYLGLNGLNLCLMCAKVGDQPTLQLKEKDIMDLYNQPEPVKSFLFYHSQSGRNSTFESVAFPGWFIAVSSEGGCPLILTQELGKANTTDFGLTMLFEPKSCDKTHTCPPCPAPELLGGPSVFLFPPKPKDTLMISRTPEVTCVVVDVSHEDPEVKFNWYVDGVEVHNAKTKPREEQYGSTYRVVSVLTVLHQDWLNGKEYKCKVSNKALPAPIEKTISKAKGQPREPQVYTLPPSRDELTKNQVSLWCLVKGFYPSDIAVEWESNGQPENNYKTTPPVLDSDGSFFLYSKLTVDKSRWQQGNVFSCSVMHEALHNHYTQKSLSLSPGKGGSHHHHHH

SEQ ID NO: 169 - protein, 395 aa, Artificial Sequence
  Synthetic construct
VLSGALCFRMKDSALKVLYLHNNQLLAGGLHAGKVIKGEEISVVPNRWLDASLSPVILGVQGGSQCLSCGVGQEPTLTLEPVNIMELYLGAKESKSFTFYRRDMGLTSSFESAAYPGWFLCTVPEADQPVRLTQLPENGGWNAPITDFYFQQCDEPKSCDKTHTCPPCPAPELLGGPSVFLFPPKPKDTLMISRTPEVTCVVVDVSHEDPEVKFNWYVDGVEVHNAKTKPREEQYGSTYRVVSVLTVLHQDWLNGKEYKCKVSNKALPAPIEKTISKAKGQPREPQVYTLPPSRDELTKNQVSLWCLVKGFYPSDIAVEWESNGQPENNYKTTPPVLDSDGSFFLYSKLTVDKSRWQQGNVFSCSVMHEALHNHYTQKSLSLSPGKGGSHHHHHH

SEQ ID NO: 170 - protein, 414 aa, Artificial Sequence
  Synthetic construct
VHTSPKVKNLNPKKFSIHDQDHKVLVLDSGNLIAVPDKNYIRPEIFFALASSLSSASAEKGSPILLGVSKGEFCLYCDKDKGQSHPSLQLKKEKLMKLAAQKESARRPFIFYRAQVGSWNMLESAAHPGWFICTSCNCNEPVGVTDKFENRKHIEFSFQPVCKAEMSPSEVSDEPKSCDKTHTCPPCPAPELLGGPSVFLFPPKPKDTLMISRTPEVTCVVVDVSHEDPEVKFNWYVDGVEVHNAKTKPREEQYGSTYRVVSVLTVLHQDWLNGKEYKCKVSNKALPAPIEKTISKAKGQPREPQVYTLPPSRDELTKNQVSLWCLVKGFYPSDIAVEWESNGQPENNYKTTPPVLDSDGSFFLYSKLTVDKSRWQQGNVFSCSVMHEALHNHYTQKSLSLSPGKGGSHHHHHH

SEQ ID NO: 171 - protein, 392 aa, Artificial Sequence
  Synthetic construct
CSLPMARYYIIKYADQKALYTRDGQLLVGDPVADNCCAEKICILPNRGLARTKVPIFLGIQGGSRCLACVETEEGPSLQLEDVNIEELYKGGEEATRFTFFQSSSGSAFRLEAAAWPGWFLCGPAEPQQPVQLTKESEPSARTKFYFEQSWEPKSCDKTHTCPPCPAPELLGGPSVFLFPPKPKDTLMISRTPEVTCVVVDVSHEDPEVKFNWYVDGVEVHNAKTKPREEQYGSTYRVVSVLTVLHQDWLNGKEYKCKVSNKALPAPIEKTISKAKGQPREPQVYTLPPSRDELTKNQVSLWCLVKGFYPSDIAVEWESNGQPENNYKTTPPVLDSDGSFFLYSKLTVDKSRWQQGNVFSCSVMHEALHNHYTQKSLSLSPGKGGSHHHHHH

SEQ ID NO: 172 - protein, 407 aa, Artificial Sequence
  Synthetic construct
CDLPETHSLDNRRTLMLLAQMSRISPSSCLMDRHDFGFPQEEFDGNQFQKAPAISVLHELIQQIFNLFTTKDSSAAWDEDLLDKFCTELYQQLNDLEACVMQEERVGETPLMNADSILAVKKYFRRITLYLTEKKYSPCAWEVVRAEIMRSLSLSTNLQERLRRKEEPKSCDKTHTCPPCPAPELLGGPSVFLFPPKPKDTLMISRTPEVTCVVVDVSHEDPEVKFNWYVDGVEVHNAKTKPREEQYGSTYRVVSVLTVLHQDWLNGKEYKCKVSNKALPAPIEKTISKAKGQPREPQVYTLPPSRDELTKNQVSLWCLVKGFYPSDIAVEWESNGQPENNYKTTPPVLDSDGSFFLYSKLTVDKSRWQQGNVFSCSVMHEALHNHYTQKSLSLSPGKGGSHHHHHH

SEQ ID NO: 173 - protein, 407 aa, Artificial Sequence
  Synthetic construct
MSYNLLGFLQRSSNFQCQKLLWQLNGRLEYCLKDRMNFDIPEEIKQLQQFQKEDAALTIYEMLQNIFAIFRQDSSSTGWNETIVENLLANVYHQINHLKTVLEEKLEKEDFTRGKLMSSLHLKRYYGRILHYLKAKEYSHCAWTIVRVEILRNFYFINRLTGYLRNEPKSCDKTHTCPPCPAPELLGGPSVFLFPPKPKDTLMISRTPEVTCVVVDVSHEDPEVKFNWYVDGVEVHNAKTKPREEQYGSTYRVVSVLTVLHQDWLNGKEYKCKVSNKALPAPIEKTISKAKGQPREPQVYTLPPSRDELTKNQVSLWCLVKGFYPSDIAVEWESNGQPENNYKTTPPVLDSDGSFFLYSKLTVDKSRWQQGNVFSCSVMHEALHNHYTQKSLSLSPGKGGSHHHHHH

SEQ ID NO: 174 - protein, 379 aa, Artificial Sequence
  Synthetic construct
QDPYVKEAENLKKYFNAGHSDVADNGTLFLGILKNWKEESDRKIMQSQIVSFYFKLFKNFKDDQSIQKSVETIKEDMNVKFFNSNKKKRDDFEKLTNYSVTDLNVQRKAIHELIQVMAELSPAAKTGKRKRSQMLFRGEPKSCDKTHTCPPCPAPELLGGPSVFLFPPKPKDTLMISRTPEVTCVVVDVSHEDPEVKFNWYVDGVEVHNAKTKPREEQYGSTYRVVSVLTVLHQDWLNGKEYKCKVSNKALPAPIEKTISKAKGQPREPQVYTLPPSRDELTKNQVSLWCLVKGFYPSDIAVEWESNGQPENNYKTTPPVLDSDGSFFLYSKLTVDKSRWQQGNVFSCSVMHEALHNHYTQKSLSLSPGKGGSHHHHHH

SEQ ID NO: 175 - protein, 353 aa, Artificial Sequence
  Synthetic construct
ALDTNYCFSSTEKNCCVRQLYIDFRKDLGWKWIHEPKGYHANFCLGPCPYIWSLDTQYSKVLALYNQHNPGASAAPCCVPQALEPLPIVYYVGRKPKVEQLSNMIVRSCKCSEPKSCDKTHTCPPCPAPELLGGPSVFLFPPKPKDTLMISRTPEVTCVVVDVSHEDPEVKFNWYVDGVEVHNAKTKPREEQYGSTYRVVSVLTVLHQDWLNGKEYKCKVSNKALPAPIEKTISKAKGQPREPQVYTLPPSRDELTKNQVSLWCLVKGFYPSDIAVEWESNGQPENNYKTTPPVLDSDGSFFLYSKLTVDKSRWQQGNVFSCSVMHEALHNHYTQKSLSLSPGKGGSHHHHHH

SEQ ID NO: 176 - protein, 418 aa, Artificial Sequence
  Synthetic construct
GPQREEFPRDLSLISPLAQAVRSSSRTPSDKPVAHVVANPQAEGQLQWLNRRANALLANGVELRDNQLVVPSEGLYLIYSQVLFKGQGCPSTHVLLTHTISRIAVSYQTKVNLLSAIKSPCQRETPEGAEAKPWYEPIYLGGVFQLEKGDRLSAEINRPDYLDFAESGQVYFGIIALEPKSCDKTHTCPPCPAPELLGGPSVFLFPPKPKDTLMISRTPEVTCVVVDVSHEDPEVKFNWYVDGVEVHNAKTKPREEQYGSTYRVVSVLTVLHQDWLNGKEYKCKVSNKALPAPIEKTISKAKGQPREPQVYTLPPSRDELTKNQVSLWCLVKGFYPSDIAVEWESNGQPENNYKTTPPVLDSDGSFFLYSKLTVDKSRWQQGNVFSCSVMHEALHNHYTQKSLSLSPGKGGSHHHHHH

SEQ ID NO: 177 - protein, 314 aa, Artificial Sequence
  Synthetic construct
ASVATELRCQCLQTLQGIHPKNIQSVNVKSPGPHCAQTEVIATLKNGRKACLNPASPIVKKIIEKMLNSDKSNEPKSCDKTHTCPPCPAPELLGGPSVFLFPPKPKDTLMISRTPEVTCVVVDVSHEDPEVKFNWYVDGVEVHNAKTKPREEQYGSTYRVVSVLTVLHQDWLNGKEYKCKVSNKALPAPIEKTISKAKGQPREPQVYTLPPSRDELTKNQVSLWCLVKGFYPSDIAVEWESNGQPENNYKTTPPVLDSDGSFFLYSKLTVDKSRWQQGNVFSCSVMHEALHNHYTQKSLSLSPGKGGSHHHHHH

SEQ ID NO: 178 - protein, 314 aa, Artificial Sequence
  Synthetic construct
APLATELRCQCLQTLQGIHLKNIQSVKVKSPGPHCAQTEVIATLKNGQKACLNPASPMVKKIIEKMLKNGKSNEPKSCDKTHTCPPCPAPELLGGPSVFLFPPKPKDTLMISRTPEVTCVVVDVSHEDPEVKFNWYVDGVEVHNAKTKPREEQYGSTYRVVSVLTVLHQDWLNGKEYKCKVSNKALPAPIEKTISKAKGQPREPQVYTLPPSRDELTKNQVSLWCLVKGFYPSDIAVEWESNGQPENNYKTTPPVLDSDGSFFLYSKLTVDKSRWQQGNVFSCSVMHEALHNHYTQKSLSLSPGKGGSHHHHHH

SEQ ID NO: 179 - protein, 314 aa, Artificial Sequence
  Synthetic construct
ASVVTELRCQCLQTLQGIHLKNIQSVNVRSPGPHCAQTEVIATLKNGKKACLNPASPMVQKIIEKILNKGSTNEPKSCDKTHTCPPCPAPELLGGPSVFLFPPKPKDTLMISRTPEVTCVVVDVSHEDPEVKFNWYVDGVEVHNAKTKPREEQYGSTYRVVSVLTVLHQDWLNGKEYKCKVSNKALPAPIEKTISKAKGQPREPQVYTLPPSRDELTKNQVSLWCLVKGFYPSDIAVEWESNGQPENNYKTTPPVLDSDGSFFLYSKLTVDKSRWQQGNVFSCSVMHEALHNHYTQKSLSLSPGKGGSHHHHHH

SEQ ID NO: 180 - protein, 315 aa, Artificial Sequence
  Synthetic construct
AAVLRELRCVCLQTTQGVHPKMISNLQVFAIGPQCSKVEVVASLKNGKEICLDPEAPFLKKVIQKILDGGNKENEPKSCDKTHTCPPCPAPELLGGPSVFLFPPKPKDTLMISRTPEVTCVVVDVSHEDPEVKFNWYVDGVEVHNAKTKPREEQYGSTYRVVSVLTVLHQDWLNGKEYKCKVSNKALPAPIEKTISKAKGQPREPQVYTLPPSRDELTKNQVSLWCLVKGFYPSDIAVEWESNGQPENNYKTTPPVLDSDGSFFLYSKLTVDKSRWQQGNVFSCSVMHEALHNHYTQKSLSLSPGKGGSHHHHHH

SEQ ID NO: 181 - protein, 313 aa, Artificial Sequence
  Synthetic construct
VLTELRCTCLRVTLRVNPKTIGKLQVFPAGPQCSKVEVVASLKNGKQVCLDPEAPFLKKVIQKILDSGNKKNEPKSCDKTHTCPPCPAPELLGGPSVFLFPPKPKDTLMISRTPEVTCVVVDVSHEDPEVKFNWYVDGVEVHNAKTKPREEQYGSTYRVVSVLTVLHQDWLNGKEYKCKVSNKALPAPIEKTISKAKGQPREPQVYTLPPSRDELTKNQVSLWCLVKGFYPSDIAVEWESNGQPENNYKTTPPVLDSDGSFFLYSKLTVDKSRWQQGNVFSCSVMHEALHNHYTQKSLSLSPGKGGSHHHHHH

SEQ ID NO: 182 - protein, 311 aa, Artificial Sequence
  Synthetic construct
AELRCMCIKTTSGIHPKNIQSLEVIGKGTHCNQVEVIATLKDGRKICLDPDAPRIKKIVQKKLAGDESADEPKSCDKTHTCPPCPAPELLGGPSVFLFPPKPKDTLMISRTPEVTCVVVDVSHEDPEVKFNWYVDGVEVHNAKTKPREEQYGSTYRVVSVLTVLHQDWLNGKEYKCKVSNKALPAPIEKTISKAKGQPREPQVYTLPPSRDELTKNQVSLWCLVKGFYPSDIAVEWESNGQPENNYKTTPPVLDSDGSFFLYSKLTVDKSRWQQGNVFSCSVMHEALHNHYTQKSLSLSPGKGGSHHHHHH

SEQ ID NO: 183 - protein, 318 aa, Artificial Sequence
  Synthetic construct
AVLPRSAKELRCQCIKTYSKPFHPKFIKELRVIESGPHCANTEIIVKLSDGRELCLDPKENWVQRVVEKFLKRAENSEPKSCDKTHTCPPCPAPELLGGPSVFLFPPKPKDTLMISRTPEVTCVVVDVSHEDPEVKFNWYVDGVEVHNAKTKPREEQYGSTYRVVSVLTVLHQDWLNGKEYKCKVSNKALPAPIEKTISKAKGQPREPQVYTLPPSRDELTKNQVSLWCLVKGFYPSDIAVEWESNGQPENNYKTTPPVLDSDGSFFLYSKLTVDKSRWQQGNVFSCSVMHEALHNHYTQKSLSLSPGKGGSHHHHHH

SEQ ID NO: 184 - protein, 344 aa, Artificial Sequence
  Synthetic construct
TPVVRKGRCSCISTNQGTIHLQSLKDLKQFAPSPSCEKIEIIATLKNGVQTCLNPDSADVKELIKKWEKQVSQKKKQKNGKKHQKKKVLKVRKSQRSRQKKTTEPKSCDKTHTCPPCPAPELLGGPSVFLFPPKPKDTLMISRTPEVTCVVVDVSHEDPEVKFNWYVDGVEVHNAKTKPREEQYGSTYRVVSVLTVLHQDWLNGKEYKCKVSNKALPAPIEKTISKAKGQPREPQVYTLPPSRDELTKNQVSLWCLVKGFYPSDIAVEWESNGQPENNYKTTPPVLDSDGSFFLYSKLTVDKSRWQQGNVFSCSVMHEALHNHYTQKSLSLSPGKGGSHHHHHH

SEQ ID NO: 185 - protein, 328 aa, Artificial Sequence
  Synthetic construct
VLEVYYTSLRCRCVQESSVFIPRRFIDRIQILPRGNGCPRKEIIVWKKNKSIVCVDPQAEWIQRMMEVLRKRSSSTLPVPVFKRKIPEPKSCDKTHTCPPCPAPELLGGPSVFLFPPKPKDTLMISRTPEVTCVVVDVSHEDPEVKFNWYVDGVEVHNAKTKPREEQYGSTYRVVSVLTVLHQDWLNGKEYKCKVSNKALPAPIEKTISKAKGQPREPQVYTLPPSRDELTKNQVSLWCLVKGFYPSDIAVEWESNGQPENNYKTTPPVLDSDGSFFLYSKLTVDKSRWQQGNVFSCSVMHEALHNHYTQKSLSLSPGKGGSHHHHHH

SEQ ID NO: 186 - protein, 330 aa, Artificial Sequence
  Synthetic construct
NEGSVTGSCYCGKRISSDSPPSVQFMNRLRKHLRAYHRCLYYTRFQLLSWSVCGGNKDPWVQELMSCLDLKECGHAYSGIVAHQKHLLPEPKSCDKTHTCPPCPAPELLGGPSVFLFPPKPKDTLMISRTPEVTCVVVDVSHEDPEVKFNWYVDGVEVHNAKTKPREEQYGSTYRVVSVLTVLHQDWLNGKEYKCKVSNKALPAPIEKTISKAKGQPREPQVYTLPPSRDELTKNQVSLWCLVKGFYPSDIAVEWESNGQPENNYKTTPPVLDSDGSFFLYSKLTVDKSRWQQGNVFSCSVMHEALHNHYTQKSLSLSPGKGGSHHHHHH

SEQ ID NO: 187 - protein, 339 aa, Artificial Sequence
  Synthetic construct
SSLNPGVARGHRDRGQASRRWLQEGGQECECKDWFLRAPRRKFMTVSGLPKKQCPCDHFKGNVKKTRHQRHHRKPNKHSRACQQFLKQCQLRSFALPLEPKSCDKTHTCPPCPAPELLGGPSVFLFPPKPKDTLMISRTPEVTCVVVDVSHEDPEVKFNWYVDGVEVHNAKTKPREEQYGSTYRVVSVLTVLHQDWLNGKEYKCKVSNKALPAPIEKTISKAKGQPREPQVYTLPPSRDELTKNQVSLWCLVKGFYPSDIAVEWESNGQPENNYKTTPPVLDSDGSFFLYSKLTVDKSRWQQGNVFSCSVMHEALHNHYTQKSLSLSPGKGGSHHHHHH

SEQ ID NO: 188 - protein, 315 aa, Artificial Sequence
  Synthetic construct
SKSMQVPFSRCCFSFAEQEIPLRAILCYRNTSSICSNEGLIFKLKRGKEACALDTVGWVQRHRKMLRHCPSKRKEPKSCDKTHTCPPCPAPELLGGPSVFLFPPKPKDTLMISRTPEVTCVVVDVSHEDPEVKFNWYVDGVEVHNAKTKPREEQYGSTYRVVSVLTVLHQDWLNGKEYKCKVSNKALPAPIEKTISKAKGQPREPQVYTLPPSRDELTKNQVSLWCLVKGFYPSDIAVEWESNGQPENNYKTTPPVLDSDGSFFLYSKLTVDKSRWQQGNVFSCSVMHEALHNHYTQKSLSLSPGKGGSHHHHHH

SEQ ID NO: 189 - protein, 317 aa, Artificial Sequence
  Synthetic construct
QPDAINAPVTCCYNFTNRKISVQRLASYRRITSSKCPKEAVIFKTIVAKEICADPKQKWVQDSMDHLDKQTQTPKTEPKSCDKTHTCPPCPAPELLGGPSVFLFPPKPKDTLMISRTPEVTCVVVDVSHEDPEVKFNWYVDGVEVHNAKTKPREEQYGSTYRVVSVLTVLHQDWLNGKEYKCKVSNKALPAPIEKTISKAKGQPREPQVYTLPPSRDELTKNQVSLWCLVKGFYPSDIAVEWESNGQPENNYKTTPPVLDSDGSFFLYSKLTVDKSRWQQGNVFSCSVMHEALHNHYTQKSLSLSPGKGGSHHHHHH

SEQ ID NO: 190 - protein, 311 aa, Artificial Sequence
  Synthetic construct
ASLAADTPTACCFSYTSRQIPQNFIADYFETSSQCSKPGVIFLTKRSRQVCADPSEEWVQKYVSDLELSAEPKSCDKTHTCPPCPAPELLGGPSVFLFPPKPKDTLMISRTPEVTCVVVDVSHEDPEVKFNWYVDGVEVHNAKTKPREEQYGSTYRVVSVLTVLHQDWLNGKEYKCKVSNKALPAPIEKTISKAKGQPREPQVYTLPPSRDELTKNQVSLWCLVKGFYPSDIAVEWESNGQPENNYKTTPPVLDSDGSFFLYSKLTVDKSRWQQGNVFSCSVMHEALHNHYTQKSLSLSPGKGGSHHHHHH

SEQ ID NO: 191 - protein, 311 aa, Artificial Sequence
  Synthetic construct
APLAADTPTACCFSYTSRQIPQNFIADYFETSSQCSKPSVIFLTKRGRQVCADPSEEWVQKYVSDLELSAEPKSCDKTHTCPPCPAPELLGGPSVFLFPPKPKDTLMISRTPEVTCVVVDVSHEDPEVKFNWYVDGVEVHNAKTKPREEQYGSTYRVVSVLTVLHQDWLNGKEYKCKVSNKALPAPIEKTISKAKGQPREPQVYTLPPSRDELTKNQVSLWCLVKGFYPSDIAVEWESNGQPENNYKTTPPVLDSDGSFFLYSKLTVDKSRWQQGNVFSCSVMHEALHNHYTQKSLSLSPGKGGSHHHHHH

SEQ ID NO: 192 - protein, 310 aa, Artificial Sequence
  Synthetic construct
APMGSDPPTACCFSYTARKLPRNFVVDYYETSSLCSQPAVVFQTKRSKQVCADPSESWVQEYVYDLELNEPKSCDKTHTCPPCPAPELLGGPSVFLFPPKPKDTLMISRTPEVTCVVVDVSHEDPEVKFNWYVDGVEVHNAKTKPREEQYGSTYRVVSVLTVLHQDWLNGKEYKCKVSNKALPAPIEKTISKAKGQPREPQVYTLPPSRDELTKNQVSLWCLVKGFYPSDIAVEWESNGQPENNYKTTPPVLDSDGSFFLYSKLTVDKSRWQQGNVFSCSVMHEALHNHYTQKSLSLSPGKGGSHHHHHH

SEQ ID NO: 193 - protein, 310 aa, Artificial Sequence
  Synthetic construct
APMGSDPPTACCFSYTARKLPRNFVVDYYETSSLCSQPAVVFQTKRGKQVCADPSESWVQEYVYDLELNEPKSCDKTHTCPPCPAPELLGGPSVFLFPPKPKDTLMISRTPEVTCVVVDVSHEDPEVKFNWYVDGVEVHNAKTKPREEQYGSTYRVVSVLTVLHQDWLNGKEYKCKVSNKALPAPIEKTISKAKGQPREPQVYTLPPSRDELTKNQVSLWCLVKGFYPSDIAVEWESNGQPENNYKTTPPVLDSDGSFFLYSKLTVDKSRWQQGNVFSCSVMHEALHNHYTQKSLSLSPGKGGSHHHHHH

SEQ ID NO: 194 - protein, 309 aa, Artificial Sequence
  Synthetic construct
SPYSSDTTPCCFAYIARPLPRAHIKEYFYTSGKCSNPAVVFVTRKNRQVCANPEKKWVREYINSLEMSEPKSCDKTHTCPPCPAPELLGGPSVFLFPPKPKDTLMISRTPEVTCVVVDVSHEDPEVKFNWYVDGVEVHNAKTKPREEQYGSTYRVVSVLTVLHQDWLNGKEYKCKVSNKALPAPIEKTISKAKGQPREPQVYTLPPSRDELTKNQVSLWCLVKGFYPSDIAVEWESNGQPENNYKTTPPVLDSDGSFFLYSKLTVDKSRWQQGNVFSCSVMHEALHNHYTQKSLSLSPGKGGSHHHHHH

SEQ ID NO: 195 - protein, 317 aa, Artificial Sequence
  Synthetic construct
QPVGINTSTTCCYRFINKKIPKQRLESYRRTTSSHCPREAVIFKTKLDKEICADPTQKWVQDFMKHLDKKTQTPKLEPKSCDKTHTCPPCPAPELLGGPSVFLFPPKPKDTLMISRTPEVTCVVVDVSHEDPEVKFNWYVDGVEVHNAKTKPREEQYGSTYRVVSVLTVLHQDWLNGKEYKCKVSNKALPAPIEKTISKAKGQPREPQVYTLPPSRDELTKNQVSLWCLVKGFYPSDIAVEWESNGQPENNYKTTPPVLDSDGSFFLYSKLTVDKSRWQQGNVFSCSVMHEALHNHYTQKSLSLSPGKGGSHHHHHH

SEQ ID NO: 196 - protein, 317 aa, Artificial Sequence
  Synthetic construct
QPDSVSIPITCCFNVINRKIPIQRLESYTRITNIQCPKEAVIFKTKRGKEVCADPKERWVRDSMKHLDQIFQNLKPEPKSCDKTHTCPPCPAPELLGGPSVFLFPPKPKDTLMISRTPEVTCVVVDVSHEDPEVKFNWYVDGVEVHNAKTKPREEQYGSTYRVVSVLTVLHQDWLNGKEYKCKVSNKALPAPIEKTISKAKGQPREPQVYTLPPSRDELTKNQVSLWCLVKGFYPSDIAVEWESNGQPENNYKTTPPVLDSDGSFFLYSKLTVDKSRWQQGNVFSCSVMHEALHNHYTQKSLSLSPGKGGSHHHHHH

SEQ ID NO: 197 - protein, 315 aa, Artificial Sequence
  Synthetic construct
GPASVPTTCCFNLANRKIPLQRLESYRRITSGKCPQKAVIFKTKLAKDICADPKKKWVQDSMKYLDQKSPTPKPEPKSCDKTHTCPPCPAPELLGGPSVFLFPPKPKDTLMISRTPEVTCVVVDVSHEDPEVKFNWYVDGVEVHNAKTKPREEQYGSTYRVVSVLTVLHQDWLNGKEYKCKVSNKALPAPIEKTISKAKGQPREPQVYTLPPSRDELTKNQVSLWCLVKGFYPSDIAVEWESNGQPENNYKTTPPVLDSDGSFFLYSKLTVDKSRWQQGNVFSCSVMHEALHNHYTQKSLSLSPGKGGSHHHHHH

SEQ ID NO: 198 - protein, 316 aa, Artificial Sequence
  Synthetic construct
QPDALNVPSTCCFTFSSKKISLQRLKSYVITTSRCPQKAVIFRTKLGKEICADPKEKWVQNYMKHLGRKAHTLKTEPKSCDKTHTCPPCPAPELLGGPSVFLFPPKPKDTLMISRTPEVTCVVVDVSHEDPEVKFNWYVDGVEVHNAKTKPREEQYGSTYRVVSVLTVLHQDWLNGKEYKCKVSNKALPAPIEKTISKAKGQPREPQVYTLPPSRDELTKNQVSLWCLVKGFYPSDIAVEWESNGQPENNYKTTPPVLDSDGSFFLYSKLTVDKSRWQQGNVFSCSVMHEALHNHYTQKSLSLSPGKGGSHHHHHH

SEQ ID NO: 199 - protein, 313 aa, Artificial Sequence
  Synthetic construct
TESSSRGPYHPSECCFTYTTYKIPRQRIMDYYETNSQCSKPGIVFITKRGHSVCTNPSDKWVQDYIKDMKENEPKSCDKTHTCPPCPAPELLGGPSVFLFPPKPKDTLMISRTPEVTCVVVDVSHEDPEVKFNWYVDGVEVHNAKTKPREEQYGSTYRVVSVLTVLHQDWLNGKEYKCKVSNKALPAPIEKTISKAKGQPREPQVYTLPPSRDELTKNQVSLWCLVKGFYPSDIAVEWESNGQPENNYKTTPPVLDSDGSFFLYSKLTVDKSRWQQGNVFSCSVMHEALHNHYTQKSLSLSPGKGGSHHHHHH

SEQ ID NO: 200 - protein, 333 aa, Artificial Sequence
  Synthetic construct
QFINDAETELMMSKLPLENPVVLNSFHFAADCCTSYISQSIPCSLMKSYFETSSECSKPGVIFLTKKGRQVCAKPSGPGVQDCMKKLKPYSIEPKSCDKTHTCPPCPAPELLGGPSVFLFPPKPKDTLMISRTPEVTCVVVDVSHEDPEVKFNWYVDGVEVHNAKTKPREEQYGSTYRVVSVLTVLHQDWLNGKEYKCKVSNKALPAPIEKTISKAKGQPREPQVYTLPPSRDELTKNQVSLWCLVKGFYPSDIAVEWESNGQPENNYKTTPPVLDSDGSFFLYSKLTVDKSRWQQGNVFSCSVMHEALHNHYTQKSLSLSPGKGGSHHHHHH

SEQ ID NO: 201 - protein, 338 aa, Artificial Sequence
  Synthetic construct
QPKVPEWVNTPSTCCLKYYEKVLPRRLVVGYRKALNCHLPAIIFVTKRNREVCTNPNDDWVQEYIKDPNLPLLPTRNLSTVKIITAKNGQPQLLNSQEPKSCDKTHTCPPCPAPELLGGPSVFLFPPKPKDTLMISRTPEVTCVVVDVSHEDPEVKFNWYVDGVEVHNAKTKPREEQYGSTYRVVSVLTVLHQDWLNGKEYKCKVSNKALPAPIEKTISKAKGQPREPQVYTLPPSRDELTKNQVSLWCLVKGFYPSDIAVEWESNGQPENNYKTTPPVLDSDGSFFLYSKLTVDKSRWQQGNVFSCSVMHEALHNHYTQKSLSLSPGKGGSHHHHHH

SEQ ID NO: 202 - protein, 312 aa, Artificial Sequence
  Synthetic construct
ARGTNVGRECCLEYFKGAIPLRKLKTWYQTSEDCSRDAIVFVTVQGRAICSDPNNKRVKNAVKYLQSLERSEPKSCDKTHTCPPCPAPELLGGPSVFLFPPKPKDTLMISRTPEVTCVVVDVSHEDPEVKFNWYVDGVEVHNAKTKPREEQYGSTYRVVSVLTVLHQDWLNGKEYKCKVSNKALPAPIEKTISKAKGQPREPQVYTLPPSRDELTKNQVSLWCLVKGFYPSDIAVEWESNGQPENNYKTTPPVLDSDGSFFLYSKLTVDKSRWQQGNVFSCSVMHEALHNHYTQKSLSLSPGKGGSHHHHHH

SEQ ID NO: 203 - protein, 310 aa, Artificial Sequence
  Synthetic construct
AQVGTNKELCCLVYTSWQIPQKFIVDYSETSPQCPKPGVILLTKRGRQICADPNKKWVQKYISDLKLNAEPKSCDKTHTCPPCPAPELLGGPSVFLFPPKPKDTLMISRTPEVTCVVVDVSHEDPEVKFNWYVDGVEVHNAKTKPREEQYGSTYRVVSVLTVLHQDWLNGKEYKCKVSNKALPAPIEKTISKAKGQPREPQVYTLPPSRDELTKNQVSLWCLVKGFYPSDIAVEWESNGQPENNYKTTPPVLDSDGSFFLYSKLTVDKSRWQQGNVFSCSVMHEALHNHYTQKSLSLSPGKGGSHHHHHH

SEQ ID NO: 204 - protein, 318 aa, Artificial Sequence
  Synthetic construct
GTNDAEDCCLSVTQKPIPGYIVRNFHYLLIKDGCRVPAVVFTTLRGRQLCAPPDQPWVERIIQRLQRTSAKMKRRSSEPKSCDKTHTCPPCPAPELLGGPSVFLFPPKPKDTLMISRTPEVTCVVVDVSHEDPEVKFNWYVDGVEVHNAKTKPREEQYGSTYRVVSVLTVLHQDWLNGKEYKCKVSNKALPAPIEKTISKAKGQPREPQVYTLPPSRDELTKNQVSLWCLVKGFYPSDIAVEWESNGQPENNYKTTPPVLDSDGSFFLYSKLTVDKSRWQQGNVFSCSVMHEALHNHYTQKSLSLSPGKGGSHHHHHH

SEQ ID NO: 205 - protein, 311 aa, Artificial Sequence
  Synthetic construct
ASNFDCCLGYTDRILHPKFIVGFTRQLANEGCDINAIIFHTKKKLSVCANPKQTWVKYIVRLLSKKVKNMEPKSCDKTHTCPPCPAPELLGGPSVFLFPPKPKDTLMISRTPEVTCVVVDVSHEDPEVKFNWYVDGVEVHNAKTKPREEQYGSTYRVVSVLTVLHQDWLNGKEYKCKVSNKALPAPIEKTISKAKGQPREPQVYTLPPSRDELTKNQVSLWCLVKGFYPSDIAVEWESNGQPENNYKTTPPVLDSDGSFFLYSKLTVDKSRWQQGNVFSCSVMHEALHNHYTQKSLSLSPGKGGSHHHHHH

SEQ ID NO: 206 - protein, 352 aa, Artificial Sequence
  Synthetic construct
SDGGAQDCCLKYSQRKIPAKVVRSYRKQEPSLGCSIPAILFLPRKRSQAELCADPKELWVQQLMQHLDKTPSPQKPAQGCRKDRGASKTGKKGKGSKGCKRTERSQTPKGPEPKSCDKTHTCPPCPAPELLGGPSVFLFPPKPKDTLMISRTPEVTCVVVDVSHEDPEVKFNWYVDGVEVHNAKTKPREEQYGSTYRVVSVLTVLHQDWLNGKEYKCKVSNKALPAPIEKTISKAKGQPREPQVYTLPPSRDELTKNQVSLWCLVKGFYPSDIAVEWESNGQPENNYKTTPPVLDSDGSFFLYSKLTVDKSRWQQGNVFSCSVMHEALHNHYTQKSLSLSPGKGGSHHHHHH

SEQ ID NO: 207 - protein, 310 aa, Artificial Sequence
  Synthetic construct
GPYGANMEDSVCCRDYVRYRLPLRVVKHFYWTSDSCPRPGVVLLTFRDKEICADPRVPWVKMILNKLSQEPKSCDKTHTCPPCPAPELLGGPSVFLFPPKPKDTLMISRTPEVTCVVVDVSHEDPEVKFNWYVDGVEVHNAKTKPREEQYGSTYRVVSVLTVLHQDWLNGKEYKCKVSNKALPAPIEKTISKAKGQPREPQVYTLPPSRDELTKNQVSLWCLVKGFYPSDIAVEWESNGQPENNYKTTPPVLDSDGSFFLYSKLTVDKSRWQQGNVFSCSVMHEALHNHYTQKSLSLSPGKGGSHHHHHH

SEQ ID NO: 208 - protein, 340 aa, Artificial Sequence
  Synthetic construct
RVTKDAETEFMMSKLPLENPVLLDRFHATSADCCISYTPRSIPCSLLESYFETNSECSKPGVIFLTKKGRRFCANPSDKQVQVCVRMLKLDTRIKTRKNEPKSCDKTHTCPPCPAPELLGGPSVFLFPPKPKDTLMISRTPEVTCVVVDVSHEDPEVKFNWYVDGVEVHNAKTKPREEQYGSTYRVVSVLTVLHQDWLNGKEYKCKVSNKALPAPIEKTISKAKGQPREPQVYTLPPSRDELTKNQVSLWCLVKGFYPSDIAVEWESNGQPENNYKTTPPVLDSDGSFFLYSKLTVDKSRWQQGNVFSCSVMHEALHNHYTQKSLSLSPGKGGSHHHHHH

SEQ ID NO: 209 - protein, 319 aa, Artificial Sequence
  Synthetic construct
VVIPSPCCMFFVSKRIPENRVVSYQLSSRSTCLKAGVIFTTKKGQQFCGDPKQEWVQRYMKNLDAKQKKASPRARAVAEPKSCDKTHTCPPCPAPELLGGPSVFLFPPKPKDTLMISRTPEVTCVVVDVSHEDPEVKFNWYVDGVEVHNAKTKPREEQYGSTYRVVSVLTVLHQDWLNGKEYKCKVSNKALPAPIEKTISKAKGQPREPQVYTLPPSRDELTKNQVSLWCLVKGFYPSDIAVEWESNGQPENNYKTTPPVLDSDGSFFLYSKLTVDKSRWQQGNVFSCSVMHEALHNHYTQKSLSLSPGKGGSHHHHHH

SEQ ID NO: 210 - protein, 368 aa, Artificial Sequence
  Synthetic construct
QGVFEDCCLAYHYPIGWAVLRRAWTYRIQEVSGSCNLPAAIFYLPKRHRKVCGNPKSREVQRAMKLLDARNKVFAKLHHNTQTFQAGPHAVKKLSSGNSKLSSSKFSNPISSSKRNVSLLISANSGLEPKSCDKTHTCPPCPAPELLGGPSVFLFPPKPKDTLMISRTPEVTCVVVDVSHEDPEVKFNWYVDGVEVHNAKTKPREEQYGSTYRVVSVLTVLHQDWLNGKEYKCKVSNKALPAPIEKTISKAKGQPREPQVYTLPPSRDELTKNQVSLWCLVKGFYPSDIAVEWESNGQPENNYKTTPPVLDSDGSFFLYSKLTVDKSRWQQGNVFSCSVMHEALHNHYTQKSLSLSPGKGGSHHHHHH

SEQ ID NO: 211 - protein, 312 aa, Artificial Sequence
  Synthetic construct
TRGSDISKTCCFQYSHKPLPWTWVRSYEFTSNSCSQRAVIFTTKRGKKVCTHPRKKWVQKYISLLKTPKQLEPKSCDKTHTCPPCPAPELLGGPSVFLFPPKPKDTLMISRTPEVTCVVVDVSHEDPEVKFNWYVDGVEVHNAKTKPREEQYGSTYRVVSVLTVLHQDWLNGKEYKCKVSNKALPAPIEKTISKAKGQPREPQVYTLPPSRDELTKNQVSLWCLVKGFYPSDIAVEWESNGQPENNYKTTPPVLDSDGSFFLYSKLTVDKSRWQQGNVFSCSVMHEALHNHYTQKSLSLSPGKGGSHHHHHH

SEQ ID NO: 212 - protein, 329 aa, Artificial Sequence
  Synthetic construct
FLLPPSTACCTQLYRKPLSDKLLRKVIQVELQEADGDCHLQAFVLHLAQRSICIHPQNPSLSQWFEHQERKLHGTLPKLNFGMLRKMGEPKSCDKTHTCPPCPAPELLGGPSVFLFPPKPKDTLMISRTPEVTCVVVDVSHEDPEVKFNWYVDGVEVHNAKTKPREEQYGSTYRVVSVLTVLHQDWLNGKEYKCKVSNKALPAPIEKTISKAKGQPREPQVYTLPPSRDELTKNQVSLWCLVKGFYPSDIAVEWESNGQPENNYKTTPPVLDSDGSFFLYSKLTVDKSRWQQGNVFSCSVMHEALHNHYTQKSLSLSPGKGGSHHHHHH

SEQ ID NO: 213 - protein, 349 aa, Artificial Sequence
  Synthetic construct
SEAILPIASSCCTEVSHHISRRLLERVNMCRIQRADGDCDLAAVILHVKRRRICVSPHNHTVKQWMKVQAAKKNGKGNVCHRKKHHGKRNSNRAHQGKHETYGHKTPYEPKSCDKTHTCPPCPAPELLGGPSVFLFPPKPKDTLMISRTPEVTCVVVDVSHEDPEVKFNWYVDGVEVHNAKTKPREEQYGSTYRVVSVLTVLHQDWLNGKEYKCKVSNKALPAPIEKTISKAKGQPREPQVYTLPPSRDELTKNQVSLWCLVKGFYPSDIAVEWESNGQPENNYKTTPPVLDSDGSFFLYSKLTVDKSRWQQGNVFSCSVMHEALHNHYTQKSLSLSPGKGGSHHHHHH

SEQ ID NO: 214 - protein, 317 aa, Artificial Sequence
  Synthetic construct
QHHGVTKCNITCSKMTSKIPVALLIHYQQNQASCGKRAIILETRQHRLFCADPKEQWVKDAMQHLDRQAAALTRNGEPKSCDKTHTCPPCPAPELLGGPSVFLFPPKPKDTLMISRTPEVTCVVVDVSHEDPEVKFNWYVDGVEVHNAKTKPREEQYGSTYRVVSVLTVLHQDWLNGKEYKCKVSNKALPAPIEKTISKAKGQPREPQVYTLPPSRDELTKNQVSLWCLVKGFYPSDIAVEWESNGQPENNYKTTPPVLDSDGSFFLYSKLTVDKSRWQQGNVFSCSVMHEALHNHYTQKSLSLSPGKGGSHHHHHH

SEQ ID NO: 215 - protein, 334 aa, Artificial Sequence
  Synthetic construct
VGSEVSDKRTCVSLTTQRLPVSRIKTYTITEGSLRAVIFITKRGLKVCADPQATWVRDVVRSMDRKSNTRNNMIQTKPTGTQQSTNTAVTLTGEPKSCDKTHTCPPCPAPELLGGPSVFLFPPKPKDTLMISRTPEVTCVVVDVSHEDPEVKFNWYVDGVEVHNAKTKPREEQYGSTYRVVSVLTVLHQDWLNGKEYKCKVSNKALPAPIEKTISKAKGQPREPQVYTLPPSRDELTKNQVSLWCLVKGFYPSDIAVEWESNGQPENNYKTTPPVLDSDGSFFLYSKLTVDKSRWQQGNVFSCSVMHEALHNHYTQKSLSLSPGKGGSHHHHHH

SEQ ID NO: 216 - protein, 381 aa, Artificial Sequence
  Synthetic construct
FNLPPGNYKKPKLLYCSNGGHFLRILPDGTVDGTRDRSDQHIQLQLSAESVGEVYIKSTETGQYLAMDTDGLLYGSQTPNEECLFLERLEENHYNTYISKKHAEKNWFVGLKKNGSCKRGPRTHYGQKAILFLPLPVSSDEPKSCDKTHTCPPCPAPELLGGPSVFLFPPKPKDTLMISRTPEVTCVVVDVSHEDPEVKFNWYVDGVEVHNAKTKPREEQYGSTYRVVSVLTVLHQDWLNGKEYKCKVSNKALPAPIEKTISKAKGQPREPQVYTLPPSRDELTKNQVSLWCLVKGFYPSDIAVEWESNGQPENNYKTTPPVLDSDGSFFLYSKLTVDKSRWQQGNVFSCSVMHEALHNHYTQKSLSLSPGKGGSHHHHHH

SEQ ID NO: 217 - protein, 387 aa, Artificial Sequence
  Synthetic construct
PALPEDGGSGAFPPGHFKDPKRLYCKNGGFFLRIHPDGRVDGVREKSDPHIKLQLQAEERGVVSIKGVCANRYLAMKEDGRLLASKCVTDECFFFERLESNNYNTYRSRKYTSWYVALKRTGQYKLGSKTGPGQKAILFLPMSAKSEPKSCDKTHTCPPCPAPELLGGPSVFLFPPKPKDTLMISRTPEVTCVVVDVSHEDPEVKFNWYVDGVEVHNAKTKPREEQYGSTYRVVSVLTVLHQDWLNGKEYKCKVSNKALPAPIEKTISKAKGQPREPQVYTLPPSRDELTKNQVSLWCLVKGFYPSDIAVEWESNGQPENNYKTTPPVLDSDGSFFLYSKLTVDKSRWQQGNVFSCSVMHEALHNHYTQKSLSLSPGKGGSHHHHHH

SEQ ID NO: 218 - protein, 463 aa, Artificial Sequence
  Synthetic construct
AAGPGARLRRDAGGRGGVYEHLGGAPRRRKLYCATKYHLQLHPSGRVNGSLENSAYSILEITAVEVGIVAIRGLFSGRYLAMNKRGRLYASEHYSAECEFVERIHELGYNTYASRLYRTVSSTPGARRQPSAERLWYVSVNGKGRPRRGFKTRRTQKSSLFLPRVLDHRDHEMVRQLQSGLPRPPGKGVQPRRRRQKQSPDNLEPSHVQASRLGSQLEASAHEPKSCDKTHTCPPCPAPELLGGPSVFLFPPKPKDTLMISRTPEVTCVVVDVSHEDPEVKFNWYVDGVEVHNAKTKPREEQYGSTYRVVSVLTVLHQDWLNGKEYKCKVSNKALPAPIEKTISKAKGQPREPQVYTLPPSRDELTKNQVSLWCLVKGFYPSDIAVEWESNGQPENNYKTTPPVLDSDGSFFLYSKLTVDKSRWQQGNVFSCSVMHEALHNHYTQKSLSLSPGKGGSHHHHHH

SEQ ID NO: 219 - protein, 417 aa, Artificial Sequence
  Synthetic construct
APTAPNGTLEAELERRWESLVALSLARLPVAAQPKEAAVQSGAGDYLLGIKRLRRLYCNVGIGFHLQALPDGRIGGAHADTRDSLLELSPVERGVVSIFGVASRFFVAMSSKGKLYGSPFFTDECTFKEILLPNNYNAYESYKYPGMFIALSKNGKTKKGNRVSPTMKVTHFLPRLEPKSCDKTHTCPPCPAPELLGGPSVFLFPPKPKDTLMISRTPEVTCVVVDVSHEDPEVKFNWYVDGVEVHNAKTKPREEQYGSTYRVVSVLTVLHQDWLNGKEYKCKVSNKALPAPIEKTISKAKGQPREPQVYTLPPSRDELTKNQVSLWCLVKGFYPSDIAVEWESNGQPENNYKTTPPVLDSDGSFFLYSKLTVDKSRWQQGNVFSCSVMHEALHNHYTQKSLSLSPGKGGSHHHHHH

SEQ ID NO: 220 - protein, 489 aa, Artificial Sequence
  Synthetic construct
HGEKRLAPKGQPGPAATDRNPRGSSSRQSSSSAMSSSSASSSPAASLGSQGSGLEQSSFQWSPSGRRTGSLYCRVGIGFHLQIYPDGKVNGSHEANMLSVLEIFAVSQGIVGIRGVFSNKFLAMSKKGKLHASAKFTDDCKFRERFQENSYNTYASAIHRTEKTGREWYVALNKRGKAKRGCSPRVKPQHISTHFLPRFKQSEQPELSFTVTVPEKKKPPSPIKPKIPLSAPRKNTNSVKYRLKFRFGEPKSCDKTHTCPPCPAPELLGGPSVFLFPPKPKDTLMISRTPEVTCVVVDVSHEDPEVKFNWYVDGVEVHNAKTKPREEQYGSTYRVVSVLTVLHQDWLNGKEYKCKVSNKALPAPIEKTISKAKGQPREPQVYTLPPSRDELTKNQVSLWCLVKGFYPSDIAVEWESNGQPENNYKTTPPVLDSDGSFFLYSKLTVDKSRWQQGNVFSCSVMHEALHNHYTQKSLSLSPGKGGSHHHHHH

SEQ ID NO: 221 - protein, 433 aa, Artificial Sequence
  Synthetic construct
LAFSDAGPHVHYGWGDPIRLRHLYTSGPHGLSSCFLRIRADGVVDCARGQSAHSLLEIKAVALRTVAIKGVHSVRYLCMGADGKMQGLLQYSEEDCAFEEEIRPDGYNVYRSEKHRLPVSLSSAKQRQLYKNRGFLPLSHFLPMLPMVPEEPEDLRGHLESDMFSSPLETDSMDPFGLVTGLEAVRSPSFEKEPKSCDKTHTCPPCPAPELLGGPSVFLFPPKPKDTLMISRTPEVTCVVVDVSHEDPEVKFNWYVDGVEVHNAKTKPREEQYGSTYRVVSVLTVLHQDWLNGKEYKCKVSNKALPAPIEKTISKAKGQPREPQVYTLPPSRDELTKNQVSLWCLVKGFYPSDIAVEWESNGQPENNYKTTPPVLDSDGSFFLYSKLTVDKSRWQQGNVFSCSVMHEALHNHYTQKSLSLSPGKGGSHHHHHH

SEQ ID NO: 222 - protein, 422 aa, Artificial Sequence
  Synthetic construct
HPIPDSSPLLQFGGQVRQRYLYTDDAQQTEAHLEIREDGTVGGAADQSPESLLQLKALKPGVIQILGVKTSRFLCQRPDGALYGSLHFDPEACSFRELLLEDGYNVYQSEAHGLPLHLPGNKSPHRDPAPRGPARFLPLPGLPPALPEPPGILAPQPPDVGSSDPLSMVGPSQGRSPSYASEPKSCDKTHTCPPCPAPELLGGPSVFLFPPKPKDTLMISRTPEVTCVVVDVSHEDPEVKFNWYVDGVEVHNAKTKPREEQYGSTYRVVSVLTVLHQDWLNGKEYKCKVSNKALPAPIEKTISKAKGQPREPQVYTLPPSRDELTKNQVSLWCLVKGFYPSDIAVEWESNGQPENNYKTTPPVLDSDGSFFLYSKLTVDKSRWQQGNVFSCSVMHEALHNHYTQKSLSLSPGKGGSHHHHHH

SEQ ID NO: 223 - protein, 376 aa, Artificial Sequence
  Synthetic construct
CGEGLFTCRSTNICISHAWVCDGVDDCEDNSDENNCSAPASEPPGSLCGADQFRCGNGSCVPRAWRCDGVDDCGDGSDEAPEICETPTCQSNEFRCRSGRCIPQHWLCDGLNDCGDGSDESQQCSAPASEPPGSLEPKSCDKTHTCPPCPAPELLGGPSVFLFPPKPKDTLMISRTPEVTCVVVDVSHEDPEVKFNWYVDGVEVHNAKTKPREEQYGSTYRVVSVLTVLHQDWLNGKEYKCKVSNKALPAPIEKTISKAKGQPREPQVYTLPPSRDELTKNQVSLWCLVKGFYPSDIAVEWESNGQPENNYKTTPPVLDSDGSFFLYSKLTVDKSRWQQGNVFSCSVMHEALHNHYTQKSLSLSPGKGGSHHHHHH

SEQ ID NO: 224 - protein, 468 aa, Artificial Sequence
  Synthetic construct
YPNASPLLGSSWGGLIHLYTATARNSYHLQIHKNGHVDGAPHQTIYSALMIRSEDAGFVVITGVMSRRYLCMDFRGNIFGSHYFDPENCRFQHQTLENGYDVYHSPQYHFLVSLGRAKRAFLPGMNPPPYSQFLSRRNEIPLIHFNTPIPRRHTRSAEDDSERDPLNVLKPRARMTPAPASCSQELPSAEDNSPMASDPLGVVRGGRVNTHAGGTGPEGCRPFAKFIEPKSCDKTHTCPPCPAPELLGGPSVFLFPPKPKDTLMISRTPEVTCVVVDVSHEDPEVKFNWYVDGVEVHNAKTKPREEQYGSTYRVVSVLTVLHQDWLNGKEYKCKVSNKALPAPIEKTISKAKGQPREPQVYTLPPSRDELTKNQVSLWCLVKGFYPSDIAVEWESNGQPENNYKTTPPVLDSDGSFFLYSKLTVDKSRWQQGNVFSCSVMHEALHNHYTQKSLSLSPGKGGSHHHHHH

SEQ ID NO: 225 - protein, 404 aa, Artificial Sequence
  Synthetic construct
CNDMTPEQMATNVNCSSPERHTRSYDYMEGGDIRVRRLFCRTQWYLRIDKRGKVKGTQEMKNNYNIMEIRTVAVGIVAIKGVESEFYLAMNKEGKLYAKKECNEDCNFKELILENHYNTYASAKWTHNGGEMFVALNQKGIPVRGKKTKKEQKTAHFLPMAITEPKSCDKTHTCPPCPAPELLGGPSVFLFPPKPKDTLMISRTPEVTCVVVDVSHEDPEVKFNWYVDGVEVHNAKTKPREEQYGSTYRVVSVLTVLHQDWLNGKEYKCKVSNKALPAPIEKTISKAKGQPREPQVYTLPPSRDELTKNQVSLWCLVKGFYPSDIAVEWESNGQPENNYKTTPPVLDSDGSFFLYSKLTVDKSRWQQGNVFSCSVMHEALHNHYTQKSLSLSPGKGGSHHHHHH

SEQ ID NO: 226 - protein, 447 aa, Artificial Sequence
  Synthetic construct
APMAEGGGQNHHEVVKFMDVYQRSYCHPIETLVDIFQEYPDEIEYIFKPSCVPLMRCGGCCNDEGLECVPTEESNITMQIMRIKPHQGQHIGEMSFLQHNKCECRPKKDRARQEKKSVRGKGKGQKRKRKKSRYKSWSVYVGARCCLMPWSLPGPHPCGPCSERRKHLFVQDPQTCKCSCKNTDSRCKARQLELNERTCRCDKPRREPKSCDKTHTCPPCPAPELLGGPSVFLFPPKPKDTLMISRTPEVTCVVVDVSHEDPEVKFNWYVDGVEVHNAKTKPREEQYGSTYRVVSVLTVLHQDWLNGKEYKCKVSNKALPAPIEKTISKAKGQPREPQVYTLPPSRDELTKNQVSLWCLVKGFYPSDIAVEWESNGQPENNYKTTPPVLDSDGSFFLYSKLTVDKSRWQQGNVFSCSVMHEALHNHYTQKSLSLSPGKGGSHHHHHH

SEQ ID NO: 227 - protein, 366 aa, Artificial Sequence
  Synthetic construct
SIEEAVPAVCKTRTVIYEIPRSQVDPTSANFLIWPPCVEVKRCTGCCNTSSVKCQPSRVHHRSVKVAKVEYVRKKPKLKEVQVRLEEHLECACATTSLNPDYREEDTGRPRESGKKRKRKRLKPTEPKSCDKTHTCPPCPAPELLGGPSVFLFPPKPKDTLMISRTPEVTCVVVDVSHEDPEVKFNWYVDGVEVHNAKTKPREEQYGSTYRVVSVLTVLHQDWLNGKEYKCKVSNKALPAPIEKTISKAKGQPREPQVYTLPPSRDELTKNQVSLWCLVKGFYPSDIAVEWESNGQPENNYKTTPPVLDSDGSFFLYSKLTVDKSRWQQGNVFSCSVMHEALHNHYTQKSLSLSPGKGGSHHHHHH

SEQ ID NO: 228 - protein, 350 aa, Artificial Sequence
  Synthetic construct
SLGSLTIAEPAMIAECKTRTEVFEISRRLIDRTNANFLVWPPCVEVQRCSGCCNNRNVQCRPTQVQLRPVQVRKIEIVRKKPIFKKATVTLEDHLACKCETVAAARPVTEPKSCDKTHTCPPCPAPELLGGPSVFLFPPKPKDTLMISRTPEVTCVVVDVSHEDPEVKFNWYVDGVEVHNAKTKPREEQYGSTYRVVSVLTVLHQDWLNGKEYKCKVSNKALPAPIEKTISKAKGQPREPQVYTLPPSRDELTKNQVSLWCLVKGFYPSDIAVEWESNGQPENNYKTTPPVLDSDGSFFLYSKLTVDKSRWQQGNVFSCSVMHEALHNHYTQKSLSLSPGKGGSHHHHHH

SEQ ID NO: 229 - protein, 361 aa, Artificial Sequence
  Synthetic construct
SSSHPIFHRGEFSVCDSVSVWVGDKTTATDIKGKEVMVLGEVNINNSVFKQYFFETKCRDPNPVDSGCRGIDSKHWNSYCTTTHTFVKALTMDGKQAAWRFIRIDTACVCVLSRKAVRRAEPKSCDKTHTCPPCPAPELLGGPSVFLFPPKPKDTLMISRTPEVTCVVVDVSHEDPEVKFNWYVDGVEVHNAKTKPREEQYGSTYRVVSVLTVLHQDWLNGKEYKCKVSNKALPAPIEKTISKAKGQPREPQVYTLPPSRDELTKNQVSLWCLVKGFYPSDIAVEWESNGQPENNYKTTPPVLDSDGSFFLYSKLTVDKSRWQQGNVFSCSVMHEALHNHYTQKSLSLSPGKGGSHHHHHH

SEQ ID NO: 230 - protein, 360 aa, Artificial Sequence
  Synthetic construct
YAEHKSHRGEYSVCDSESLWVTDKSSAIDIRGHQVTVLGEIKTGNSPVKQYFYETRCKEARPVKNGCRGIDDKHWNSQCKTSQTYVRALTSENNKLVGWRWIRIDTSCVCALSRKIGRTEPKSCDKTHTCPPCPAPELLGGPSVFLFPPKPKDTLMISRTPEVTCVVVDVSHEDPEVKFNWYVDGVEVHNAKTKPREEQYGSTYRVVSVLTVLHQDWLNGKEYKCKVSNKALPAPIEKTISKAKGQPREPQVYTLPPSRDELTKNQVSLWCLVKGFYPSDIAVEWESNGQPENNYKTTPPVLDSDGSFFLYSKLTVDKSRWQQGNVFSCSVMHEALHNHYTQKSLSLSPGKGGSHHHHHH

SEQ ID NO: 231 - protein, 371 aa, Artificial Sequence
  Synthetic construct
GVSETAPASRRGELAVCDAVSGWVTDRRTAVDLRGREVEVLGEVPAAGGSPLRQYFFETRCKADNAEEGGPGAGGGGCRGVDRRHWVSECKAKQSYVRALTADAQGRVGWRWIRIDTACVCTLLSRTGRAEPKSCDKTHTCPPCPAPELLGGPSVFLFPPKPKDTLMISRTPEVTCVVVDVSHEDPEVKFNWYVDGVEVHNAKTKPREEQYGSTYRVVSVLTVLHQDWLNGKEYKCKVSNKALPAPIEKTISKAKGQPREPQVYTLPPSRDELTKNQVSLWCLVKGFYPSDIAVEWESNGQPENNYKTTPPVLDSDGSFFLYSKLTVDKSRWQQGNVFSCSVMHEALHNHYTQKSLSLSPGKGGSHHHHHH

SEQ ID NO: 232 - protein, 360 aa, Artificial Sequence
  Synthetic construct
HSDPARRGELSVCDSISEWVTAADKKTAVDMSGGTVTVLEKVPVSKGQLKQYFYETKCNPMGYTKEGCRGIDKRHWNSQCRTTQSYVRALTMDSKKRIGWRFIRIDTSCVCTLTIKRGREPKSCDKTHTCPPCPAPELLGGPSVFLFPPKPKDTLMISRTPEVTCVVVDVSHEDPEVKFNWYVDGVEVHNAKTKPREEQYGSTYRVVSVLTVLHQDWLNGKEYKCKVSNKALPAPIEKTISKAKGQPREPQVYTLPPSRDELTKNQVSLWCLVKGFYPSDIAVEWESNGQPENNYKTTPPVLDSDGSFFLYSKLTVDKSRWQQGNVFSCSVMHEALHNHYTQKSLSLSPGKGGSHHHHHH

SEQ ID NO: 233 - protein, 353 aa, Artificial Sequence; identical to SEQ ID NO: 175
  Synthetic construct

SEQ ID NO: 234 - protein, 353 aa, Artificial Sequence
  Synthetic construct
ALDAAYCFRNVQDNCCLRPLYIDFKRDLGWKWIHEPKGYNANFCAGACPYLWSSDTQHSRVLSLYNTINPEASASPCCVSQDLEPLTILYYIGKTPKIEQLSNMIVKSCKCSEPKSCDKTHTCPPCPAPELLGGPSVFLFPPKPKDTLMISRTPEVTCVVVDVSHEDPEVKFNWYVDGVEVHNAKTKPREEQYGSTYRVVSVLTVLHQDWLNGKEYKCKVSNKALPAPIEKTISKAKGQPREPQVYTLPPSRDELTKNQVSLWCLVKGFYPSDIAVEWESNGQPENNYKTTPPVLDSDGSFFLYSKLTVDKSRWQQGNVFSCSVMHEALHNHYTQKSLSLSPGKGGSHHHHHH

SEQ ID NO: 235 - protein, 475 aa, Artificial Sequence
  Synthetic construct
VVNGIPTRTNIGWMVSLRYRNKHICGGSLIKESWVLTARQCFPSRDLKDYEAWLGIHDVHGRGDEKCKQVLNVSQLVYGPEGSDLVLMKLARPAVLDDFVSTIDLPNYGCTIPEKTSCSVYGWGYTGLINYDGLLRVAHLYIMGNEKCSQHHRGKVTLNESEICAGAEKIGSGPCEGDYGGPLVCEQHKMRMVLGVIVPGRGCAIPNRPGIFVRVAYYAKWIHKIILTYKVPQSEPKSCDKTHTCPPCPAPELLGGPSVFLFPPKPKDTLMISRTPEVTCVVVDVSHEDPEVKFNWYVDGVEVHNAKTKPREEQYGSTYRVVSVLTVLHQDWLNGKEYKCKVSNKALPAPIEKTISKAKGQPREPQVYTLPPSRDELTKNQVSLWCLVKGFYPSDIAVEWESNGQPENNYKTTPPVLDSDGSFFLYSKLTVDKSRWQQGNVFSCSVMHEALHNHYTQKSLSLSPGKGGSHHHHHH

SEQ ID NO: 236 - protein, 438 aa, Artificial Sequence
  Synthetic construct
RNLPVATPDPGMFPCLHHSQNLLRAVSNMLQKARQTLEFYPCTSEEIDHEDITKDKTSTVEACLPLELTKNESCLNSRETSFITNGSCLASRKTSFMMALCLSSIYEDLKMYQVEFKTMNAKLLMDPKRQIFLDQNMLAVIDELMQALNFNSETVPQKSSLEEPDFYKTKIKLCILLHAFRIRAVTIDRVMSYLNASEPKSCDKTHTCPPCPAPELLGGPSVFLFPPKPKDTLMISRTPEVTCVVVDVSHEDPEVKFNWYVDGVEVHNAKTKPREEQYGSTYRVVSVLTVLHQDWLNGKEYKCKVSNKALPAPIEKTISKAKGQPREPQVYTLPPSRDELTKNQVSLWCLVKGFYPSDIAVEWESNGQPENNYKTTPPVLDSDGSFFLYSKLTVDKSRWQQGNVFSCSVMHEALHNHYTQKSLSLSPGKGGSHHHHHH

SEQ ID NO: 237 - protein, 547 aa, Artificial Sequence
  Synthetic construct
IWELKKDVYVVELDWYPDAPGEMVVLTCDTPEEDGITWTLDQSSEVLGSGKTLTIQVKEFGDAGQYTCHKGGEVLSHSLLLLHKKEDGIWSTDILKDQKEPKNKTFLRCEAKNYSGRFTCWWLTTISTDLTFSVKSSRGSSDPQGVTCGAATLSAERVRGDNKEYEYSVECQEDSACPAAEESLPIEVMVDAVHKLKYENYTSSFFIRDIIKPDPPKNLQLKPLKNSRQVEVSWEYPDTWSTPHSYFSLTFCVQVQGKSKREKKDRVFTDKTSATVICRKNASISVRAQDRYYSSSWSEWASVPCSEPKSCDKTHTCPPCPAPELLGGPSVFLFPPKPKDTLMISRTPEVTCVVVDVSHEDPEVKFNWYVDGVEVHNAKTKPREEQYGSTYRVVSVLTVLHQDWLNGKEYKCKVSNKALPAPIEKTISKAKGQPREPQVYTLPPSRDELTKNQVSLWCLVKGFYPSDIAVEWESNGQPENNYKTTPPVLDSDGSFFLYSKLTVDKSRWQQGNVFSCSVMHEALHNHYTQKSLSLSPGKGGSHHHHHH

SEQ ID NO: 238 - protein, 416 aa, Artificial Sequence
  Synthetic construct
VPVARLRGALPDARGCHIAQFKSLSPQELQAFKRAKDALEESLLLKDCKCRSRLFPRTWDLRQLQVRERPVALEAELALTLKVLEATADTDPALGDVLDQPLHTLHHILSQLRACIQPQPTAGPRTRGRLHHWLHRLQEAPKKESPGCLEASVTFNLFRLLTRDLNCVASGDLCVEPKSCDKTHTCPPCPAPELLGGPSVFLFPPKPKDTLMISRTPEVTCVVVDVSHEDPEVKFNWYVDGVEVHNAKTKPREEQYGSTYRVVSVLTVLHQDWLNGKEYKCKVSNKALPAPIEKTISKAKGQPREPQVYTLPPSRDELTKNQVSLWCLVKGFYPSDIAVEWESNGQPENNYKTTPPVLDSDGSFFLYSKLTVDKSRWQQGNVFSCSVMHEALHNHYTQKSLSLSPGKGGSHHHHHH

SEQ ID NO: 239 - protein, 422 aa, Artificial Sequence
  Synthetic construct
GPVPTSKPTTTGKGCHIGRFKSLSPQELASFKKARDALEESLKLKNWSCSSPVFPGNWDLRLLQVRERPVALEAELALTLKVLEAAAGPALEDVLDQPLHTLHHILSQLQACIQPQPTAGPRPRGRLHHWLHRLQEAPKKESAGCLEASVTFNLFRLLTRDLKYVADGNLCLRTSTHPESTEPKSCDKTHTCPPCPAPELLGGPSVFLFPPKPKDTLMISRTPEVTCVVVDVSHEDPEVKFNWYVDGVEVHNAKTKPREEQYGSTYRVVSVLTVLHQDWLNGKEYKCKVSNKALPAPIEKTISKAKGQPREPQVYTLPPSRDELTKNQVSLWCLVKGFYPSDIAVEWESNGQPENNYKTTPPVLDSDGSFFLYSKLTVDKSRWQQGNVFSCSVMHEALHNHYTQKSLSLSPGKGGSHHHHHH

SEQ ID NO: 240 - protein, 400 aa, Artificial Sequence
  Synthetic construct
SAPFSFLSNVKYNFMRIIKYEFILNDALNQSIIRANDQYLTAAALHNLDEAVKFDMGAYKSSKDDAKITVILRISKTQLYVTAQDEDQPVLLKEMPEIPKTITGSETNLLFFWETHGTKNYFTSVAHPNLFIATKQDYWVCLAGGPPSITDFQILENQAEPKSCDKTHTCPPCPAPELLGGPSVFLFPPKPKDTLMISRTPEVTCVVVDVSHEDPEVKFNWYVDGVEVHNAKTKPREEQYGSTYRVVSVLTVLHQDWLNGKEYKCKVSNKALPAPIEKTISKAKGQPREPQVYTLPPSRDELTKNQVSLWCLVKGFYPSDIAVEWESNGQPENNYKTTPPVLDSDGSFFLYSKLTVDKSRWQQGNVFSCSVMHEALHNHYTQKSLSLSPGKGGSHHHHHH

SEQ ID NO: 241 - protein, 394 aa, Artificial Sequence
  Synthetic construct
APVRSLNCTLRDSQQKSLVMSGPYELKALHLQGQDMEQQVVFSMSFVQGEESNDKIPVALGLKEKNLYLSCVLKDDKPTLQLESVDPKNYPKKKMEKRFVFNKIEINNKLEFESAQFPNWYISTSQAENMPVFLGGTKGGQDITDFTMQFVSSEPKSCDKTHTCPPCPAPELLGGPSVFLFPPKPKDTLMISRTPEVTCVVVDVSHEDPEVKFNWYVDGVEVHNAKTKPREEQYGSTYRVVSVLTVLHQDWLNGKEYKCKVSNKALPAPIEKTISKAKGQPREPQVYTLPPSRDELTKNQVSLWCLVKGFYPSDIAVEWESNGQPENNYKTTPPVLDSDGSFFLYSKLTVDKSRWQQGNVFSCSVMHEALHNHYTQKSLSLSPGKGGSHHHHHH

SEQ ID NO: 242 - protein, 393 aa, Artificial Sequence
  Synthetic construct
RPSGRKSSKMQAFRIWDVNQKTFYLRNNQLVAGYLQGPNVNLEEKIDVVPIEPHALFLGIHGGKMCLSCVKSGDETRLQLEAVNITDLSENRKQDKRFAFIRSDSGPTTSFESAACPGWFLCTAMEADQPVSLTNMPDEGVMVTKFYFQEDEEPKSCDKTHTCPPCPAPELLGGPSVFLFPPKPKDTLMISRTPEVTCVVVDVSHEDPEVKFNWYVDGVEVHNAKTKPREEQYGSTYRVVSVLTVLHQDWLNGKEYKCKVSNKALPAPIEKTISKAKGQPREPQVYTLPPSRDELTKNQVSLWCLVKGFYPSDIAVEWESNGQPENNYKTTPPVLDSDGSFFLYSKLTVDKSRWQQGNVFSCSVMHEALHNHYTQKSLSLSPGKGGSHHHHHH

SEQ ID NO: 243 - protein, 401 aa, Artificial Sequence
  Synthetic construct
REAAPKSYAIRDSRQMVWVLSGNSLIAAPLSRSIKPVTLHLIACRDTEFSDKEKGNMVYLGIKGKDLCLFCAEIQGKPTLQLKLQGSQDNIGKDTCWKLVGIHTCINLDVRESCFMGTLDQWGIGVGRKKWKSSFQHHHLRKKDKDFSSMRTNIGMPGRMEPKSCDKTHTCPPCPAPELLGGPSVFLFPPKPKDTLMISRTPEVTCVVVDVSHEDPEVKFNWYVDGVEVHNAKTKPREEQYGSTYRVVSVLTVLHQDWLNGKEYKCKVSNKALPAPIEKTISKAKGQPREPQVYTLPPSRDELTKNQVSLWCLVKGFYPSDIAVEWESNGQPENNYKTTPPVLDSDGSFFLYSKLTVDKSRWQQGNVFSCSVMHEALHNHYTQKSLSLSPGKGGSHHHHHH

SEQ ID NO: 244 - protein, 393 aa, Artificial Sequence
  Synthetic construct
SMCKPITGTINDLNQQVWTLQGQNLVAVPRSDSVTPVTVAVITCKYPEALEQGRGDPIYLGIQNPEMCLYCEKVGEQPTLQLKEQKIMDLYGQPEPVKPFLFYRAKTGRTSTLESVAFPDWFIASSKRDQPIILTSELGKSYNTAFELNINDEPKSCDKTHTCPPCPAPELLGGPSVFLFPPKPKDTLMISRTPEVTCVVVDVSHEDPEVKFNWYVDGVEVHNAKTKPREEQYGSTYRVVSVLTVLHQDWLNGKEYKCKVSNKALPAPIEKTISKAKGQPREPQVYTLPPSRDELTKNQVSLWCLVKGFYPSDIAVEWESNGQPENNYKTTPPVLDSDGSFFLYSKLTVDKSRWQQGNVFSCSVMHEALHNHYTQKSLSLSPGKGGSHHHHHH

SEQ ID NO: 245 - protein, 311 aa, Artificial Sequence
  Synthetic construct
EAEEDGDLQCLCVKTTSQVRPRHITSLEVIKAGPHCPTAQLIATLKNGRKICLDLQAPLYKKIIKKLLESEPKSCDKTHTCPPCPAPELLGGPSVFLFPPKPKDTLMISRTPEVTCVVVDVSHEDPEVKFNWYVDGVEVHNAKTKPREEQYGSTYRVVSVLTVLHQDWLNGKEYKCKVSNKALPAPIEKTISKAKGQPREPQVYTLPPSRDELTKNQVSLWCLVKGFYPSDIAVEWESNGQPENNYKTTPPVLDSDGSFFLYSKLTVDKSRWQQGNVFSCSVMHEALHNHYTQKSLSLSPGKGGSHHHHHH

SEQ ID NO: 246 - protein, 318 aa, Artificial Sequence
  Synthetic construct
VPLSRTVRCTCISISNQPVNPRSLEKLEIIPASQFCPRVEIIATMKKKGEKRCLNPESKAIKNLLKAVSKERSKRSPEPKSCDKTHTCPPCPAPELLGGPSVFLFPPKPKDTLMISRTPEVTCVVVDVSHEDPEVKFNWYVDGVEVHNAKTKPREEQYGSTYRVVSVLTVLHQDWLNGKEYKCKVSNKALPAPIEKTISKAKGQPREPQVYTLPPSRDELTKNQVSLWCLVKGFYPSDIAVEWESNGQPENNYKTTPPVLDSDGSFFLYSKLTVDKSRWQQGNVFSCSVMHEALHNHYTQKSLSLSPGKGGSHHHHHH

SEQ ID NO: 247 - protein, 318 aa, Artificial Sequence
  Synthetic construct
SKCKCSRKGPKIRYSDVKKLEMKPKYPHCEEKMVIITTKSVSRYRGQEHCLHPKLQSTKRFIKWYNAWNEKRRVYEEEPKSCDKTHTCPPCPAPELLGGPSVFLFPPKPKDTLMISRTPEVTCVVVDVSHEDPEVKFNWYVDGVEVHNAKTKPREEQYGSTYRVVSVLTVLHQDWLNGKEYKCKVSNKALPAPIEKTISKAKGQPREPQVYTLPPSRDELTKNQVSLWCLVKGFYPSDIAVEWESNGQPENNYKTTPPVLDSDGSFFLYSKLTVDKSRWQQGNVFSCSVMHEALHNHYTQKSLSLSPGKGGSHHHHHH

SEQ ID NO: 248 - protein, 334 aa, Artificial Sequence
  Synthetic construct
VGSEVSHRRTCVSLTTQRLPVSRIKTYTITEGSLRAVIFITKRGLKVCADPQATWVRDVVRSMDRKSNTRNNMIQTKPTGTQQSTNTAVTLTGEPKSCDKTHTCPPCPAPELLGGPSVFLFPPKPKDTLMISRTPEVTCVVVDVSHEDPEVKFNWYVDGVEVHNAKTKPREEQYGSTYRVVSVLTVLHQDWLNGKEYKCKVSNKALPAPIEKTISKAKGQPREPQVYTLPPSRDELTKNQVSLWCLVKGFYPSDIAVEWESNGQPENNYKTTPPVLDSDGSFFLYSKLTVDKSRWQQGNVFSCSVMHEALHNHYTQKSLSLSPGKGGSHHHHHH

SEQ ID NO: 249 - protein, 407 aa, Artificial Sequence; identical to SEQ ID NO: 172
  Synthetic construct

SEQ ID NO: 250 - protein, 406 aa, Artificial Sequence
  Synthetic construct
CDLPQTHSLGSRRTLMLLAQMRKISLFSCLKDRHDFGFPQEEFGNQFQKAETIPVLHEMIQQIFNLFSTKDSSAAWDETLLDKFYTELYQQLNDLEACVIQGVGVTETPLMKEDSILAVRKYFQRITLYLKEKKYSPCAWEVVRAEIMRSFSLSTNLQESLRSKEEPKSCDKTHTCPPCPAPELLGGPSVFLFPPKPKDTLMISRTPEVTCVVVDVSHEDPEVKFNWYVDGVEVHNAKTKPREEQYGSTYRVVSVLTVLHQDWLNGKEYKCKVSNKALPAPIEKTISKAKGQPREPQVYTLPPSRDELTKNQVSLWCLVKGFYPSDIAVEWESNGQPENNYKTTPPVLDSDGSFFLYSKLTVDKSRWQQGNVFSCSVMHEALHNHYTQKSLSLSPGKGGSHHHHHH

SEQ ID NO: 251 - protein, 407 aa, Artificial Sequence
  Synthetic construct
CDLPQTHSLGNRRALILLAQMGRISHFSCLKDRHDFGFPEEEFDGHQFQKAQAISVLHEMIQQTFNLFSTEDSSAAWEQSLLEKFSTELYQQLNDLEACVIQEVGVEETPLMNEDSILAVRKYFQRITLYLTEKKYSPCAWEVVRAEIMRSLSFSTNLQKRLRRKDEPKSCDKTHTCPPCPAPELLGGPSVFLFPPKPKDTLMISRTPEVTCVVVDVSHEDPEVKFNWYVDGVEVHNAKTKPREEQYGSTYRVVSVLTVLHQDWLNGKEYKCKVSNKALPAPIEKTISKAKGQPREPQVYTLPPSRDELTKNQVSLWCLVKGFYPSDIAVEWESNGQPENNYKTTPPVLDSDGSFFLYSKLTVDKSRWQQGNVFSCSVMHEALHNHYTQKSLSLSPGKGGSHHHHHH

SEQ ID NO: 252 - protein, 407 aa, Artificial Sequence
  Synthetic construct
CNLSQTHSLNNRRTLMLMAQMRRISPFSCLKDRHDFEFPQEEFDGNQFQKAQAISVLHEMMQQTFNLFSTKNSSAAWDETLLEKFYIELFQQMNDLEACVIQEVGVEETPLMNEDSILAVKKYFQRITLYLMEKKYSPCAWEVVRAEIMRSLSFSTNLQKRLRRKDEPKSCDKTHTCPPCPAPELLGGPSVFLFPPKPKDTLMISRTPEVTCVVVDVSHEDPEVKFNWYVDGVEVHNAKTKPREEQYGSTYRVVSVLTVLHQDWLNGKEYKCKVSNKALPAPIEKTISKAKGQPREPQVYTLPPSRDELTKNQVSLWCLVKGFYPSDIAVEWESNGQPENNYKTTPPVLDSDGSFFLYSKLTVDKSRWQQGNVFSCSVMHEALHNHYTQKSLSLSPGKGGSHHHHHH

SEQ ID NO: 253 - protein, 407 aa, Artificial Sequence
  Synthetic construct
CDLPQTHSLGNRRALILLAQMRRISPFSCLKDRHDFEFPQEEFDDKQFQKAQAISVLHEMIQQTFNLFSTKDSSAALDETLLDEFYIELDQQLNDLESCVMQEVGVIESPLMYEDSILAVRKYFQRITLYLTEKKYSSCAWEVVRAEIMRSFSLSINLQKRLKSKEEPKSCDKTHTCPPCPAPELLGGPSVFLFPPKPKDTLMISRTPEVTCVVVDVSHEDPEVKFNWYVDGVEVHNAKTKPREEQYGSTYRVVSVLTVLHQDWLNGKEYKCKVSNKALPAPIEKTISKAKGQPREPQVYTLPPSRDELTKNQVSLWCLVKGFYPSDIAVEWESNGQPENNYKTTPPVLDSDGSFFLYSKLTVDKSRWQQGNVFSCSVMHEALHNHYTQKSLSLSPGKGGSHHHHHH

SEQ ID NO: 254 - protein, 407 aa, Artificial Sequence
  Synthetic construct
CDLPQTHSLRNRRALILLAQMGRISPFSCLKDRHEFRFPEEEFDGHQFQKTQAISVLHEMIQQTFNLFSTEDSSAAWEQSLLEKFSTELYQQLNDLEACVIQEVGVEETPLMNEDFILAVRKYFQRITLYLMEKKYSPCAWEVVRAEIMRSFSFSTNLKKGLRRKDEPKSCDKTHTCPPCPAPELLGGPSVFLFPPKPKDTLMISRTPEVTCVVVDVSHEDPEVKFNWYVDGVEVHNAKTKPREEQYGSTYRVVSVLTVLHQDWLNGKEYKCKVSNKALPAPIEKTISKAKGQPREPQVYTLPPSRDELTKNQVSLWCLVKGFYPSDIAVEWESNGQPENNYKTTPPVLDSDGSFFLYSKLTVDKSRWQQGNVFSCSVMHEALHNHYTQKSLSLSPGKGGSHHHHHH

SEQ ID NO: 255 - protein, 407 aa, Artificial Sequence
  Synthetic construct
CDLPQTHSLGNRRALILLAQMGRISPFSCLKDRHDFGFPQEEFDGNQFQKAQAISVLHEMIQQTFNLFSTKDSSATWEQSLLEKFSTELNQQLNDLEACVIQEVGVEETPLMNVDSILAVKKYFQRITLYLTEKKYSPCAWEVVRAEIMRSFSLSKIFQERLRRKEEPKSCDKTHTCPPCPAPELLGGPSVFLFPPKPKDTLMISRTPEVTCVVVDVSHEDPEVKFNWYVDGVEVHNAKTKPREEQYGSTYRVVSVLTVLHQDWLNGKEYKCKVSNKALPAPIEKTISKAKGQPREPQVYTLPPSRDELTKNQVSLWCLVKGFYPSDIAVEWESNGQPENNYKTTPPVLDSDGSFFLYSKLTVDKSRWQQGNVFSCSVMHEALHNHYTQKSLSLSPGKGGSHHHHHH

SEQ ID NO: 256 - protein, 407 aa, Artificial Sequence
  Synthetic construct
CDLPQTHSLGNRRALILLAQMGRISPFSCLKDRHDFGLPQEEFDGNQFQKTQAISVLHEMIQQTFNLFSTEDSSAAWEQSLLEKFSTELYQQLNNLEACVIQEVGMEETPLMNEDSILAVRKYFQRITLYLTEKKYSPCAWEVVRAEIMRSLSFSTNLQKILRRKDEPKSCDKTHTCPPCPAPELLGGPSVFLFPPKPKDTLMISRTPEVTCVVVDVSHEDPEVKFNWYVDGVEVHNAKTKPREEQYGSTYRVVSVLTVLHQDWLNGKEYKCKVSNKALPAPIEKTISKAKGQPREPQVYTLPPSRDELTKNQVSLWCLVKGFYPSDIAVEWESNGQPENNYKTTPPVLDSDGSFFLYSKLTVDKSRWQQGNVFSCSVMHEALHNHYTQKSLSLSPGKGGSHHHHHH

SEQ ID NO: 257 - protein, 409 aa, Artificial Sequence
  Synthetic construct
LGCDLPQTHSLSNRRTLMIMAQMGRISPFSCLKDRHDFGFPQEEFDGNQFQKAQAISVLHEMIQQTFNLFSTKDSSATWDETLLDKFYTELYQQLNDLEACMMQEVGVEDTPLMNVDSILTVRKYFQRITLYLTEKKYSPCAWEVVRAEIMRSFSLSANLQERLRRKEEPKSCDKTHTCPPCPAPELLGGPSVFLFPPKPKDTLMISRTPEVTCVVVDVSHEDPEVKFNWYVDGVEVHNAKTKPREEQYGSTYRVVSVLTVLHQDWLNGKEYKCKVSNKALPAPIEKTISKAKGQPREPQVYTLPPSRDELTKNQVSLWCLVKGFYPSDIAVEWESNGQPENNYKTTPPVLDSDGSFFLYSKLTVDKSRWQQGNVFSCSVMHEALHNHYTQKSLSLSPGKGGSHHHHHH

SEQ ID NO: 258 - protein, 410 aa, Artificial Sequence
  Synthetic construct
SLDCDLPQTHSLGHRRTMMLLAQMRRISLFSCLKDRHDFRFPQEEFDGNQFQKAEAISVLHEVIQQTFNLFSTKDSSVAWDERLLDKLYTELYQQLNDLEACVMQEVWVGGTPLMNEDSILAVRKYFQRITLYLTEKKYSPCAWEVVRAEIMRSFSSSRNLQERLRRKEEPKSCDKTHTCPPCPAPELLGGPSVFLFPPKPKDTLMISRTPEVTCVVVDVSHEDPEVKFNWYVDGVEVHNAKTKPREEQYGSTYRVVSVLTVLHQDWLNGKEYKCKVSNKALPAPIEKTISKAKGQPREPQVYTLPPSRDELTKNQVSLWCLVKGFYPSDIAVEWESNGQPENNYKTTPPVLDSDGSFFLYSKLTVDKSRWQQGNVFSCSVMHEALHNHYTQKSLSLSPGKGGSHHHHHH

SEQ ID NO: 259 - protein, 407 aa, Artificial Sequence
  Synthetic construct
CDLPQTHSLGNRRALILLGQMGRISPFSCLKDRHDFRIPQEEFDGNQFQKAQAISVLHEMIQQTFNLFSTEDSSAAWEQSLLEKFSTELYQQLNDLEACVIQEVGVEETPLMNEDSILAVRKYFQRITLYLIERKYSPCAWEVVRAEIMRSLSFSTNLQKRLRRKDEPKSCDKTHTCPPCPAPELLGGPSVFLFPPKPKDTLMISRTPEVTCVVVDVSHEDPEVKFNWYVDGVEVHNAKTKPREEQYGSTYRVVSVLTVLHQDWLNGKEYKCKVSNKALPAPIEKTISKAKGQPREPQVYTLPPSRDELTKNQVSLWCLVKGFYPSDIAVEWESNGQPENNYKTTPPVLDSDGSFFLYSKLTVDKSRWQQGNVFSCSVMHEALHNHYTQKSLSLSPGKGGSHHHHHH

SEQ ID NO: 260 - protein, 407 aa, Artificial Sequence
  Synthetic construct
CDLPQTHSLGNRRALILLAQMGRISHFSCLKDRYDFGFPQEVFDGNQFQKAQAISAFHEMIQQTFNLFSTKDSSAAWDETLLDKFYIELFQQLNDLEACVTQEVGVEEIALMNEDSILAVRKYFQRITLYLMGKKYSPCAWEVVRAEIMRSFSFSTNLQKGLRRKDEPKSCDKTHTCPPCPAPELLGGPSVFLFPPKPKDTLMISRTPEVTCVVVDVSHEDPEVKFNWYVDGVEVHNAKTKPREEQYGSTYRVVSVLTVLHQDWLNGKEYKCKVSNKALPAPIEKTISKAKGQPREPQVYTLPPSRDELTKNQVSLWCLVKGFYPSDIAVEWESNGQPENNYKTTPPVLDSDGSFFLYSKLTVDKSRWQQGNVFSCSVMHEALHNHYTQKSLSLSPGKGGSHHHHHH

SEQ ID NO: 261 - protein, 355 aa, Artificial Sequence
  Synthetic construct
ARARNGDHCPLGPGRCCRLHTVRASLEDLGWADWVLSPREVQVTMCIGACPSQFRAANMHAQIKTSLHRLKPDTVPAPCCVPASYNPMVLIQKTDTGVSLQTYDDLLAKDCHCIEPKSCDKTHTCPPCPAPELLGGPSVFLFPPKPKDTLMISRTPEVTCVVVDVSHEDPEVKFNWYVDGVEVHNAKTKPREEQYGSTYRVVSVLTVLHQDWLNGKEYKCKVSNKALPAPIEKTISKAKGQPREPQVYTLPPSRDELTKNQVSLWCLVKGFYPSDIAVEWESNGQPENNYKTTPPVLDSDGSFFLYSKLTVDKSRWQQGNVFSCSVMHEALHNHYTQKSLSLSPGKGGSHHHHHH

SEQ ID NO: 262 - protein, 351 aa, Artificial Sequence
  Synthetic construct
SAGAGSHCQKTSLRVNFEDIGWDSWIIAPKEYEAYECKGGCFFPLADDVTPTKHAIVQTLVHLKFPTKVGKACCVPTKLSPISVLYKDDMGVPTLKYHYEGMSVAECGCREPKSCDKTHTCPPCPAPELLGGPSVFLFPPKPKDTLMISRTPEVTCVVVDVSHEDPEVKFNWYVDGVEVHNAKTKPREEQYGSTYRVVSVLTVLHQDWLNGKEYKCKVSNKALPAPIEKTISKAKGQPREPQVYTLPPSRDELTKNQVSLWCLVKGFYPSDIAVEWESNGQPENNYKTTPPVLDSDGSFFLYSKLTVDKSRWQQGNVFSCSVMHEALHNHYTQKSLSLSPGKGGSHHHHHH

SEQ ID NO: 263 - protein, 349 aa, Artificial Sequence
  Synthetic construct
NAKGNYCKRTPLYIDFKEIGWDSWIIAPPGYEAYECRGVCNYPLAEHLTPTKHAIIQALVHLKNSQKASKACCVPTKLEPISILYLDKGVVTYKFKYEGMAVSECGCREPKSCDKTHTCPPCPAPELLGGPSVFLFPPKPKDTLMISRTPEVTCVVVDVSHEDPEVKFNWYVDGVEVHNAKTKPREEQYGSTYRVVSVLTVLHQDWLNGKEYKCKVSNKALPAPIEKTISKAKGQPREPQVYTLPPSRDELTKNQVSLWCLVKGFYPSDIAVEWESNGQPENNYKTTPPVLDSDGSFFLYSKLTVDKSRWQQGNVFSCSVMHEALHNHYTQKSLSLSPGKGGSHHHHHH

SEQ ID NO: 264 - protein, 375 aa, Artificial Sequence
  Synthetic construct
STPLMSWPWSPSALRLLQRPPEEPAAHANCHRVALNISFQELGWERWIVYPPSFIFHYCHGGCGLHIPPNLSLPVPGAPPTPAQPYSLLPGAQPCCAALPGTMRPLHVRTTSDGGYSFKYETVPNLLTQHCACIEPKSCDKTHTCPPCPAPELLGGPSVFLFPPKPKDTLMISRTPEVTCVVVDVSHEDPEVKFNWYVDGVEVHNAKTKPREEQYGSTYRVVSVLTVLHQDWLNGKEYKCKVSNKALPAPIEKTISKAKGQPREPQVYTLPPSRDELTKNQVSLWCLVKGFYPSDIAVEWESNGQPENNYKTTPPVLDSDGSFFLYSKLTVDKSRWQQGNVFSCSVMHEALHNHYTQKSLSLSPGKGGSHHHHHH

SEQ ID NO: 265 - protein, 351 aa, Artificial Sequence
  Synthetic construct
QWIEPRNCARRYLKVDFADIGWSEWIISPKSFDAYYCSGACQFPMPKSLKPSNHATIQSIVRAVGVVPGIPEPCCVPEKMSSLSILFFDENKNVVLKVYPNMTVESCACREPKSCDKTHTCPPCPAPELLGGPSVFLFPPKPKDTLMISRTPEVTCVVVDVSHEDPEVKFNWYVDGVEVHNAKTKPREEQYGSTYRVVSVLTVLHQDWLNGKEYKCKVSNKALPAPIEKTISKAKGQPREPQVYTLPPSRDELTKNQVSLWCLVKGFYPSDIAVEWESNGQPENNYKTTPPVLDSDGSFFLYSKLTVDKSRWQQGNVFSCSVMHEALHNHYTQKSLSLSPGKGGSHHHHHH

SEQ ID NO: 266 - protein, 484 aa, Artificial Sequence
  Synthetic construct
TNELKQMQDKYSKSGIACFLKEDDSYWDPNDEESMNSPCWQVKWQLRQLVRKMILRTSEETISTVQEKQQNISPLVRERGPQRVAAHITGTRGRSNTLSSPNSKNEKALGRKINSWESSRSGHSFLSNLHLRNGELVIHEKGFYYIYSQTYFRFQEEIKENTKNDKQMVQYIYKYTSYPDPILLMKSARNSCWSKDAEYGLYSIYQGGIFELKENDRIFVSVTNEHLIDMDHEASFFGAFLVGEPKSCDKTHTCPPCPAPELLGGPSVFLFPPKPKDTLMISRTPEVTCVVVDVSHEDPEVKFNWYVDGVEVHNAKTKPREEQYGSTYRVVSVLTVLHQDWLNGKEYKCKVSNKALPAPIEKTISKAKGQPREPQVYTLPPSRDELTKNQVSLWCLVKGFYPSDIAVEWESNGQPENNYKTTPPVLDSDGSFFLYSKLTVDKSRWQQGNVFSCSVMHEALHNHYTQKSLSLSPGKGGSHHHHHH

SEQ ID NO: 267 - protein, 421 aa, Artificial Sequence
  Synthetic construct
LKGQEFAPSHQQVYAPLRADGDKPRAHLTVVRQTPTQHFKNQFPALHWEHELGLAFTKNRMNYTNKFLLIPESGDYFIYSQVTFRGMTSECSEIRQAGRPNKPDSITVVITKVTDSYPEPTQLLMGTKSVCEVGSNWFQPIYLGAMFSLQEGDKLMVNVSDISLVDYTKEDKTFFGAFLLEPKSCDKTHTCPPCPAPELLGGPSVFLFPPKPKDTLMISRTPEVTCVVVDVSHEDPEVKFNWYVDGVEVHNAKTKPREEQYGSTYRVVSVLTVLHQDWLNGKEYKCKVSNKALPAPIEKTISKAKGQPREPQVYTLPPSRDELTKNQVSLWCLVKGFYPSDIAVEWESNGQPENNYKTTPPVLDSDGSFFLYSKLTVDKSRWQQGNVFSCSVMHEALHNHYTQKSLSLSPGKGGSHHHHHH

SEQ ID NO: 268 - protein, 412 aa, Artificial Sequence
  Synthetic construct
LPGVGLTPSAAQTARQHPKMHLAHSTLKPAAHLIGDPSKQNSLLWRANTDRAFLQDGFSLSNNSLLVPTSGIYFVYSQVVFSGKAYSPKATSSPLYLAHEVQLFSSQYPFHVPLLSSQKMVYPGLQEPWLHSMYHGAAFQLTQGDQLSTHTDGIPHLVLSPSTVFFGAFALEPKSCDKTHTCPPCPAPELLGGPSVFLFPPKPKDTLMISRTPEVTCVVVDVSHEDPEVKFNWYVDGVEVHNAKTKPREEQYGSTYRVVSVLTVLHQDWLNGKEYKCKVSNKALPAPIEKTISKAKGQPREPQVYTLPPSRDELTKNQVSLWCLVKGFYPSDIAVEWESNGQPENNYKTTPPVLDSDGSFFLYSKLTVDKSRWQQGNVFSCSVMHEALHNHYTQKSLSLSPGKGGSHHHHHH

SEQ ID NO: 269 - protein, 393 aa, Artificial Sequence
  Synthetic construct
AVQGPEETVTQDCLQLIADSETPTIQKGSYTFVPWLLSFKRGSALEEKENKILVKETGYFFIYGQVLYTDKTYAMGHLIQRKKVHVFGDELSLVTLFRCIQNMPETLPNNSCYSAGIAKLEEGDELQLAIPRENAQISLDGDVTFFGALKLLEPKSCDKTHTCPPCPAPELLGGPSVFLFPPKPKDTLMISRTPEVTCVVVDVSHEDPEVKFNWYVDGVEVHNAKTKPREEQYGSTYRVVSVLTVLHQDWLNGKEYKCKVSNKALPAPIEKTISKAKGQPREPQVYTLPPSRDELTKNQVSLWCLVKGFYPSDIAVEWESNGQPENNYKTTPPVLDSDGSFFLYSKLTVDKSRWQQGNVFSCSVMHEALHNHYTQKSLSLSPGKGGSHHHHHH

SEQ ID NO: 270 - protein, 313 aa, Artificial Sequence
  Synthetic construct
AVLTQKQKKQHSVLHLVPINATSKDDSDVTEVMWQPALRRGRGLQAQGYGVRIQDAGVYLLYSQVLFQDVTFEPKSCDKTHTCPPCPAPELLGGPSVFLFPPKPKDTLMISRTPEVTCVVVDVSHEDPEVKFNWYVDGVEVHNAKTKPREEQYGSTYRVVSVLTVLHQDWLNGKEYKCKVSNKALPAPIEKTISKAKGQPREPQVYTLPPSRDELTKNQVSLWCLVKGFYPSDIAVEWESNGQPENNYKTTPPVLDSDGSFFLYSKLTVDKSRWQQGNVFSCSVMHEALHNHYTQKSLSLSPGKGGSHHHHHH

SEQ ID NO: 271 - protein, 419 aa, Artificial Sequence
  Synthetic construct
IRAEKAMVDGSWLDLAKRSKLEAQPFAHLTINATDIPSGSHKVSLSSWYHDRGWAKISNMTFSNGKLIVNQDGFYYLYANICFRHHETSGDLATEYLQLMVYVTKTSIKIPSSHTLMKGGSTKYWSGNSEFHFYSINVGGFFKLRSGEEISIEVSNPSLLDPDQDATYFGAFKVRDIDEPKSCDKTHTCPPCPAPELLGGPSVFLFPPKPKDTLMISRTPEVTCVVVDVSHEDPEVKFNWYVDGVEVHNAKTKPREEQYGSTYRVVSVLTVLHQDWLNGKEYKCKVSNKALPAPIEKTISKAKGQPREPQVYTLPPSRDELTKNQVSLWCLVKGFYPSDIAVEWESNGQPENNYKTTPPVLDSDGSFFLYSKLTVDKSRWQQGNVFSCSVMHEALHNHYTQKSLSLSPGKGGSHHHHHH

SEQ ID NO: 272 - protein, 390 aa, Artificial Sequence
  Synthetic construct
MQKGDQNPQIAAHVISEASSKTTSVLQWAEKGYYTMSNNLVTLENGKQLTVKRQGLYYIYAQVTFCSNREASSQAPFIASLCLKSPGRFERILLRAANTHSSAKPCGQQSIHLGGVFELQPGASVFVNVTDPSQVSHGTGFTSFGLLKLEPKSCDKTHTCPPCPAPELLGGPSVFLFPPKPKDTLMISRTPEVTCVVVDVSHEDPEVKFNWYVDGVEVHNAKTKPREEQYGSTYRVVSVLTVLHQDWLNGKEYKCKVSNKALPAPIEKTISKAKGQPREPQVYTLPPSRDELTKNQVSLWCLVKGFYPSDIAVEWESNGQPENNYKTTPPVLDSDGSFFLYSKLTVDKSRWQQGNVFSCSVMHEALHNHYTQKSLSLSPGKGGSHHHHHH

SEQ ID NO: 273 - protein, 473 aa, Artificial Sequence
  Synthetic construct
SKSNEGADGPVKNKKKGKKAGPPGPNGPPGPPGPPGPQGPPGIPGIPGIPGTTVMGPPGPPGPPGPQGPPGLQGPSGAADKAGTRENQPAVVHLQGQGSAIQVKNDLSGGVLNDWSRITMNPKVFKLHPRSGELEVLVDGTYFIYSQVEVYYINFTDFASYEVVVDEKPFLQCTRSIETGKTNYNTCYTAGVCLLKARQKIAVKMVHADISINMSKHTTFFGAIRLGEAPASEPKSCDKTHTCPPCPAPELLGGPSVFLFPPKPKDTLMISRTPEVTCVVVDVSHEDPEVKFNWYVDGVEVHNAKTKPREEQYGSTYRVVSVLTVLHQDWLNGKEYKCKVSNKALPAPIEKTISKAKGQPREPQVYTLPPSRDELTKNQVSLWCLVKGFYPSDIAVEWESNGQPENNYKTTPPVLDSDGSFFLYSKLTVDKSRWQQGNVFSCSVMHEALHNHYTQKSLSLSPGKGGSHHHHHH

SEQ ID NO: 274 - protein, 393 aa, Artificial Sequence
  Synthetic construct
QIGHPSPPPEKKELRKVAHLTGKSNSRSMPLEWEDTYGIVLLSGVKYKKGGLVINETGLYFVYSKVYFRGQSCNNLPLSHKVYMRNSKYPQDLVMMEGKMMSYCTTGQMWARSSYLGAVFNLTSADHLYVNVSELSLVNFEESQTFFGLYKLEPKSCDKTHTCPPCPAPELLGGPSVFLFPPKPKDTLMISRTPEVTCVVVDVSHEDPEVKFNWYVDGVEVHNAKTKPREEQYGSTYRVVSVLTVLHQDWLNGKEYKCKVSNKALPAPIEKTISKAKGQPREPQVYTLPPSRDELTKNQVSLWCLVKGFYPSDIAVEWESNGQPENNYKTTPPVLDSDGSFFLYSKLTVDKSRWQQGNVFSCSVMHEALHNHYTQKSLSLSPGKGGSHHHHHH

SEQ ID NO: 275 - protein, 396 aa, Artificial Sequence
  Synthetic construct
QRFAQAQQQLPLESLGWDVAELQLNHTGPQQDPRLYWQGGPALGRSFLHGPELDKGQLRIHRDGIYMVHIQVTLAICSSTTASRHHPTTLAVGICSPASRSISLLRLSFHQGCTIASQRLTPLARGDTLCTNLTGTLLPSRNTDETFFGVQWVRPEPKSCDKTHTCPPCPAPELLGGPSVFLFPPKPKDTLMISRTPEVTCVVVDVSHEDPEVKFNWYVDGVEVHNAKTKPREEQYGSTYRVVSVLTVLHQDWLNGKEYKCKVSNKALPAPIEKTISKAKGQPREPQVYTLPPSRDELTKNQVSLWCLVKGFYPSDIAVEWESNGQPENNYKTTPPVLDSDGSFFLYSKLTVDKSRWQQGNVFSCSVMHEALHNHYTQKSLSLSPGKGGSHHHHHH

SEQ ID NO: 276 - protein, 407 aa, Artificial Sequence
  Synthetic construct
APPRLICDSRVLERYLLEAKEAENITTGCAEHCSLNENITVPDTKVNFYAWKRMEVGQQAVEVWQGLALLSEAVLRGQALLVNSSQPWEPLQLHVDKAVSGLRSLTTLLRALGAQKEAISPPDAASAAPLRTITADTFRKLFRVYSNFLRGKLKLYTGEACRTGDREPKSCDKTHTCPPCPAPELLGGPSVFLFPPKPKDTLMISRTPEVTCVVVDVSHEDPEVKFNWYVDGVEVHNAKTKPREEQYGSTYRVVSVLTVLHQDWLNGKEYKCKVSNKALPAPIEKTISKAKGQPREPQVYTLPPSRDELTKNQVSLWCLVKGFYPSDIAVEWESNGQPENNYKTTPPVLDSDGSFFLYSKLTVDKSRWQQGNVFSCSVMHEALHNHYTQKSLSLSPGKGGSHHHHHH

SEQ ID NO: 277 - protein, 432 aa, Artificial Sequence
  Synthetic construct
FPTIPLSRLFDNAMLRAHRLHQLAFDTYQEFEEAYIPKEQKYSFLQNPQTSLCFSESIPTPSNREETQQKSNLELLRISLLLIQSWLEPVQFLRSVFANSLVYGASDSNVYDLLKDLEEGIQTLMGRLEDGSPRTGQIFKQTYSKFDTNSHNDDALLKNYGLLYCFRKDMDKVETFLRIVQCRSVEGSCGFEPKSCDKTHTCPPCPAPELLGGPSVFLFPPKPKDTLMISRTPEVTCVVVDVSHEDPEVKFNWYVDGVEVHNAKTKPREEQYGSTYRVVSVLTVLHQDWLNGKEYKCKVSNKALPAPIEKTISKAKGQPREPQVYTLPPSRDELTKNQVSLWCLVKGFYPSDIAVEWESNGQPENNYKTTPPVLDSDGSFFLYSKLTVDKSRWQQGNVFSCSVMHEALHNHYTQKSLSLSPGKGGSHHHHHH

SEQ ID NO: 278 - protein, 432 aa, Artificial Sequence
  Synthetic construct
FPTIPLSRLFDNAMLRARRLYQLAYDTYQEFEEAYILKEQKYSFLQNPQTSLCFSESIPTPSNRVKTQQKSNLELLRISLLLIQSWLEPVQLLRSVFANSLVYGASDSNVYRHLKDLEEGIQTLMWRLEDGSPRTGQIFNQSYSKFDTKSHNDDALLKNYGLLYCFRKDMDKVETFLRIVQCRSVEGSCGFEPKSCDKTHTCPPCPAPELLGGPSVFLFPPKPKDTLMISRTPEVTCVVVDVSHEDPEVKFNWYVDGVEVHNAKTKPREEQYGSTYRVVSVLTVLHQDWLNGKEYKCKVSNKALPAPIEKTISKAKGQPREPQVYTLPPSRDELTKNQVSLWCLVKGFYPSDIAVEWESNGQPENNYKTTPPVLDSDGSFFLYSKLTVDKSRWQQGNVFSCSVMHEALHNHYTQKSLSLSPGKGGSHHHHHH

SEQ ID NO: 279 - protein, 440 aa, Artificial Sequence
  Synthetic construct
LPICPGGAARCQVTLRDLFDRAVVLSHYIHNLSSEMFSEFDKRYTHGRGFITKAINSCHTSSLATPEDKEQAQQMNQKDFLSLIVSILRSWNEPLYHLVTEVRGMQEAPEAILSKAVEIEEQTKRLLEGMELIVSQVHPETKENEIYPVWSGLPSLQMADEESRLSAYYNLLHCLRRDSHKIDNYLKLLKCRIIHNNNCEPKSCDKTHTCPPCPAPELLGGPSVFLFPPKPKDTLMISRTPEVTCVVVDVSHEDPEVKFNWYVDGVEVHNAKTKPREEQYGSTYRVVSVLTVLHQDWLNGKEYKCKVSNKALPAPIEKTISKAKGQPREPQVYTLPPSRDELTKNQVSLWCLVKGFYPSDIAVEWESNGQPENNYKTTPPVLDSDGSFFLYSKLTVDKSRWQQGNVFSCSVMHEALHNHYTQKSLSLSPGKGGSHHHHHH

SEQ ID NO: 280 - protein, 418 aa, Artificial Sequence
  Synthetic construct
TPLGPASSLPQSFLLKCLEQVRKIQGDGAALQEKLVSECATYKLCHPEELVLLGHSLGIPWAPLSSCPSQALQLAGCLSQLHSGLFLYQGLLQALEGISPELGPTLDTLQLDVADFATTIWQQMEELGMAPALQPTQGAMPAFASAFQRRAGGVLVASHLQSFLEVSYRVLRHLAQPEPKSCDKTHTCPPCPAPELLGGPSVFLFPPKPKDTLMISRTPEVTCVVVDVSHEDPEVKFNWYVDGVEVHNAKTKPREEQYGSTYRVVSVLTVLHQDWLNGKEYKCKVSNKALPAPIEKTISKAKGQPREPQVYTLPPSRDELTKNQVSLWCLVKGFYPSDIAVEWESNGQPENNYKTTPPVLDSDGSFFLYSKLTVDKSRWQQGNVFSCSVMHEALHNHYTQKSLSLSPGKGGSHHHHHH

SEQ ID NO: 281 - protein, 387 aa, Artificial Sequence
  Synthetic construct
VPIQKVQDDTKTLIKTIVTRINDISHTQSVSSKQKVTGLDFIPGLHPILTLSKMDQTLAVYQQILTSMPSRNVIQISNDLENLRDLLHVLAFSKSCHLPWASGLETLDSLGGVLEASGYSTEVVALSRLQGSLQDMLWQLDLSPGCEPKSCDKTHTCPPCPAPELLGGPSVFLFPPKPKDTLMISRTPEVTCVVVDVSHEDPEVKFNWYVDGVEVHNAKTKPREEQYGSTYRVVSVLTVLHQDWLNGKEYKCKVSNKALPAPIEKTISKAKGQPREPQVYTLPPSRDELTKNQVSLWCLVKGFYPSDIAVEWESNGQPENNYKTTPPVLDSDGSFFLYSKLTVDKSRWQQGNVFSCSVMHEALHNHYTQKSLSLSPGKGGSHHHHHH

SEQ ID NO: 282 - protein, 659 aa, Artificial Sequence
  Synthetic construct
EEVSEYCSHMIGSGHLQSLQRLIDSQMETSCQITFEFVDQEQLKDPVCYLKKAFLLVQDIMEDTMRFRDNTPNAIAIVQLQELSLRLKSCFTKDYEEHDKACVRTFYETPLQLLEKVKNVFNETKNLLDKDWNIFSKNCNNSFAECSSQDVVTKPDCNCLYPKAIPSSDPASVSPHQPLAPSMAPVAGLTWEDSEGTEGSSLLPGEQPLHTVDPGSAKQRPPRSTCQSFEPPETPVVKDSTIGGSPQPRPSVGAFNPGMEDILDSAMGTNWVPEEASGEASEIPVPQGTELSPSRPGGGSMQTEPARPSNFLSASSPLPASAKGQQPADVTGTALPRVGPVRPTGQDWNHTPQKTDHPSALLRDPPEPGSPRISSLRPQGLSNPSTLSAQPQLSRSHSSGSVLPLGELEGRRSTRDRREPKSCDKTHTCPPCPAPELLGGPSVFLFPPKPKDTLMISRTPEVTCVVVDVSHEDPEVKFNWYVDGVEVHNAKTKPREEQYGSTYRVVSVLTVLHQDWLNGKEYKCKVSNKALPAPIEKTISKAKGQPREPQVYTLPPSRDELTKNQVSLWCLVKGFYPSDIAVEWESNGQPENNYKTTPPVLDSDGSFFLYSKLTVDKSRWQQGNVFSCSVMHEALHNHYTQKSLSLSPGKGGSHHHHHH

SEQ ID NO: 283 - protein, 311 aa, Artificial Sequence
  Synthetic construct
GPETLCGAELVDALQFVCGDRGFYFNKPTGYGSSSRRAPQTGIVDECCFRSCDLRRLEMYCAPLKPAKSAEPKSCDKTHTCPPCPAPELLGGPSVFLFPPKPKDTLMISRTPEVTCVVVDVSHEDPEVKFNWYVDGVEVHNAKTKPREEQYGSTYRVVSVLTVLHQDWLNGKEYKCKVSNKALPAPIEKTISKAKGQPREPQVYTLPPSRDELTKNQVSLWCLVKGFYPSDIAVEWESNGQPENNYKTTPPVLDSDGSFFLYSKLTVDKSRWQQGNVFSCSVMHEALHNHYTQKSLSLSPGKGGSHHHHHH

SEQ ID NO: 284 - protein, 308 aa, Artificial Sequence
  Synthetic construct
AYRPSETLCGGELVDTLQFVCGDRGFYFSRPASRVSRRSRGIVEECCFRSCDLALLETYCATPAKSEEPKSCDKTHTCPPCPAPELLGGPSVFLFPPKPKDTLMISRTPEVTCVVVDVSHEDPEVKFNWYVDGVEVHNAKTKPREEQYGSTYRVVSVLTVLHQDWLNGKEYKCKVSNKALPAPIEKTISKAKGQPREPQVYTLPPSRDELTKNQVSLWCLVKGFYPSDIAVEWESNGQPENNYKTTPPVLDSDGSFFLYSKLTVDKSRWQQGNVFSCSVMHEALHNHYTQKSLSLSPGKGGSHHHHHH

What is claimed is:

1. A bispecific binding agent comprising:
a) a first binding domain comprising a cytokine selected from the group consisting of CXCL12, CCL1, CCL2, CCL3, CCL3L1, CCL4, CC4L1, CCL5, CCL7, CCL8, CCL11, CCL13, CCL14, CCL15, CCL16, CCL17, CCL18, CCL19, CCL20, CCL21, CCL22, CCL23, CCL24, CCL25, CCL26, CCL27, CCL28, CXCL11, CXCL1, CXCL2, CXCL3, CXCL4, CXCL5, CXCL6, CXCL7, CXCL8, CXCL9, CXCL10, CXCL13, CXCL14, CXCL16, CXCL17, CX3CL1, XCL1, XCL2, vMIPII, vCXC1 that specifically binds to at least one endogenous cell surface receptor, and
b) a second binding domain that specifically binds to a target protein, wherein the endogenous cell surface receptor is membrane associated, and wherein the binding of the first binding domain to the at least one endogenous cell surface receptor results in the internalization of the target protein bound to the bispecific binding agent.

2. A bispecific binding agent comprising:
a) a first binding domain that specifically binds to at least one endogenous cell surface receptor, and
b) a second binding domain that specifically binds to a target protein,
wherein the endogenous cell surface receptor is membrane associated, and wherein the binding of the first binding domain to the at least one endogenous cell surface receptor results in the internalization of the target protein bound to the bispecific binding agent.

3. The bispecific binding agent of any preceding claim, wherein the first binding domain specifically binds to one endogenous cell surface receptor.

4. The bispecific binding agent of any preceding claim wherein the first binding domain specifically binds to no more than two endogenous cell surface receptors.

5. The bispecific binding agent of any preceding claim, wherein the at least one endogenous cell surface receptor comprises targeting receptors and recycling receptors.

6. The bispecific binding agent of any one of the preceding claims, wherein the at least one endogenous cell surface receptor comprises single-pass and multi-pass membrane proteins.

7. The bispecific binding agent of any one of the preceding claims, wherein the at least one endogenous cell surface receptor comprises at least one cytokine receptor.

8. The bispecific binding agent of claim 7, wherein the at least one cytokine receptor comprises at least one chemokine receptor.

9. The bispecific binding agent of claim 8, wherein the at least one chemokine receptors are selected from the group consisting of CXCR1, CXCR2, CXCR3, CXCR4, CXCR5, CXCR6, CXCR7 (or ACKR3), XCR1, XCR2, CCR1, CCR2, CCR3, CCR4, CCR5, CCR6, CCR7, CCR8, CCR9, CCR10, CCR11, CX3CR1, ACKR1, ACKR2, ACKR4, and ACKR5.

10. The bispecific binding agent of claim 8, wherein the at least one chemokine receptors are selected from the group consisting of CCR1, CCR2, CCR3, CCR4, CCR5, CCR6, CCR7, CCR8, CCR9, CCR10, CCR11,

11. The bispecific binding agent of claim 8, wherein the at least one chemokine receptors are selected from the group consisting of CXCR7, CXCR4, CXCR3, CXCR1, CXCR2, CXCR5, CXCR6, CX3CR1, XCR1, XCR2.

12. The bispecific binding agent of claim 8, wherein the at least one chemokine receptors are selected from the group consisting of ACKR1, ACKR2, CXCR7, ACKR4.

13. The bispecific binding agent of claim 7, wherein the at least one cytokine receptor comprises at least one interleukin receptor.

14. The bispecific binding agent of claim 13 wherein the at least one interleukin receptors are selected from the group consisting of CD25, IL2RB, IL2RG, TL3RA, IL4R, IL13RA1, IL13RA2, IL5RA, IL6R, TL7R, IL9R, IL10RA, IL10RB, IL11RA, IL12RB1, IL12RB2, IL15RA, CD4, IL17RA, IL17RC, IL17RB, IL17RE, IL27RA, IL18R1, IL20RA, IL20RB, IL22RA1, IL21R, IL28RA, IL31RA, ST2, IL1RAP, CSF1R, IL1R1, IL1RL2, IL1R2.

15. The bispecific binding agent of claim 7, wherein the at least one cytokine receptor comprises at least one interferon receptor.

16. The bispecific binding agent of claim 15, wherein the at least one interferon receptors are selected from the group consisting of IFNAR1, IFNAR2, IFNGR1, IFNGR2.

17. The bispecific binding agent of any claim 7, wherein the at least one cytokine receptor comprises at least one prolactin receptor.

18. The bispecific binding agent of claim 17, wherein the at least one prolactin receptors are selected from the group consisting of EPOR, GHR, PRLR, CSF3R, LEPR, CSF1R.

19. The bispecific binding agent of claim 7, wherein the at least one cytokine receptor comprises at least one TNF receptor.

20. The bispecific binding agent of claim 19, wherein the at least one TNF receptors are selected from the group consisting of TNFR1, TNFR2, DR4, DR5, DCR1, DCR2, DR3, LTBR, BAFFR, TACI, OPG, RANK, CD40, EDAR, DCR3, FAS, CD27.

21. The bispecific binding agent of claim 3, wherein the at least one endogenous cell surface receptor comprises at least one growth factor receptor.

22. The bispecific binding agent of claim 21, wherein the at least one growth factor receptors are selected from the group consisting of FGFR2B, VEGFR2, PDGFRA, PDGFRB, NGFR, TRKC, TRKB, M6PR, IGF1R.

23. The bispecific binding agent of any one of the preceding claims, wherein the binding of the first binding domain to the at least one endogenous cell surface receptor results in the degradation of the target protein bound to the bispecific binding agent.

24. The bispecific binding agent of any one of claims 2-23, wherein the first binding domain comprises a cytokine, a chemokine, a growth factor or an isoform or a derivative capable of binding thereof.

25. The bispecific binding agent of claim 24, wherein the chemokine comprises a CXC chemokine, CCL chemokine, viral chemokine, or an isoform or a derivative capable of binding thereof.

26. The bispecific binding agent of claim 25, wherein the chemokine is selected from the group consisting of CCL1, CCL2, CCL3, CCL3L1, CCL4, CC4L1, CCL5, CCL7, CCL8, CCL11, CCL13, CCL14, CCL15, CCL16, CCL17, CCL18, CCL19, CCL20, CCL21, CCL22, CCL23, CCL24, CCL25, CCL26, CCL27, CCL28.

27. The bispecific binding agent of claim 25, wherein the chemokine is selected from the group consisting of CXCL12, CXCL11, CXCL1, CXCL2, CXCL3, CXCL4, CXCL5, CXCL6, CXCL7, CXCL8, CXCL9, CXCL10, CXCL13, CXCL14, CXCL16, CXCL17, CX3CL1, XCL1, XCL2,

28. The bispecific binding agent of claim 25, wherein the chemokine is selected from the group consisting of vMIPII, vCXC1.

29. The bispecific binding agent of claim 24, wherein the cytokine is selected from the group consisting of interleukins, interferons, prolactins, tumor necrosis factors, and TGF-betas.

30. The bispecific binding agent of claim 29, wherein the cytokine is an interleukin.

31. The bispecific binding agent of claim 30, wherein the interleukin is selected from the group consisting of IL2, TL3, IL4, IL5, IL6, IL7, IL9, IL10, IL11, IL12A, IL12B, IL13, IL15, IL16, IL17A, IL17B, IL17C, IL17F, IL18, IL19, IL20, IL21, IL22, IL24, IL25, IL26, IL27, IL28A, IL28B, IL29, IL31, IL32, IL33, IL34, IL36A, IL36B, IL36G, IL36RA, IL37, IL38, IL1A, IL1B, IL1RN.

32. The bispecific binding agent of claim 29, wherein the cytokine is an interferon.

33. The bispecific binding agent of claim 32, wherein the interferon is selected from the group consisting of IFNA, IFNA1, IFNA2, IFNA4, IFNA5, IFNA6, IFNA7, IFNA8, IFNA10, IFNA14, IFNA16, IFNB, IFNG.

34. The bispecific binding agent of claim 29, wherein the cytokine is a prolactin,

35. The bispecific binding agent of claim 34, wherein the prolactin is selected from the group consisting of EPO, GH1, GH2, PRL, CSF3, LEP, CSF1.

36. The bispecific binding agent of claim 29, wherein the cytokine is an tumor necrosis factor.

37. The bispecific binding agent of claim 36, wherein the tumor necrosis factor is selected from the group consisting of TNFA. TNFB, TRAIL, TL1, BAFF, APRIL, RANKL, CD40LG, EDA, FASLG, and CD70.

38. The bispecific binding agent of claim 29, wherein the cytokine is a TGF-beta.

39. The bispecific binding agent of claim 38, wherein the TGF-beta is selected from the group consisting of TGFB1, TGFB2, TGFB3, GDF15, GDF2, BMP10, INHA, BMP3.

40. The bispecific binding agent of claim 24, wherein the first binding domain comprises a growth factor.

41. The bispecific binding agent of claim 10, wherein the growth factor is selected from the group consisting of FGF1, FGF2, FGF3, FGF4, FGF5, FGF19, FGF21, FGF23, KGF, VEGF, PDGFA, PDGFB, NGF, NTF3, NTF4, BDNF, IGF1, IGF2.

42. The bispecific binding agent of any one of the preceding claims, wherein the target protein comprises a soluble target protein and a membrane-associated target protein.

43. The bispecific binding agent of any one of the preceding claims, wherein the target protein is a membrane-associated target protein, and wherein the second binding domain binds to an extracellular epitope of a membrane-associated target protein.

44. The bispecific binding agent of any one of the preceding claims, wherein the target cell comprises a neoplastic cell.

45. The bispecific binding agent of any one of the preceding claims, wherein the target cell is a cancer cell selected from the group consisting of breast cancer, B cell lymphoma, pancreatic cancer, Hodgkin's lymphoma, ovarian cancer, prostate cancer, mesothelioma, lung cancer, non-Hodgkin's B-cell (B-NHL), melanoma, chronic lymphocytic leukemia, acute lymphocytic leukemia, neuroblastoma, glioma, glioblastoma, bladder cancer, and colorectal cancer.

46. The bispecific binding agent of any one of the preceding claims, wherein the target cell comprises an immune cell.

47. The bispecific binding agent of any one of the preceding claims, wherein the target protein is an immune checkpoint protein.

48. The bispecific binding agent of any one of the preceding claims, wherein the target protein comprises a cancer antigen.

49. The bispecific binding agent of any one of the preceding claims, wherein the cancer antigen comprises HER2, EGFR, CDCP1, CD38, IGF-1R, MMP14, and TROP2.

50. The bispecific binding agent of any one of the preceding claims, wherein the target protein comprises an immunomodulatory protein.

51. The bispecific binding agent of any one of the preceding claims, wherein the immunomodulatory protein comprises PD-L1, PD-1, CTLA-4, B7-H3, B7-H4, LAG3, NKG2D, TIM-3, VISTA, CD39, CD73 (NT5E), A2AR, SIGLEC7, and SIGLEC15.

52. The bispecific binding agent of any one of the preceding claims, wherein the target protein comprises a B cell antigen.

53. The bispecific binding agent of any one of the preceding claims, wherein the B cell antigen comprises CD19 and CD20.

54. The bispecific binding agent of any one of the preceding claims, wherein the target protein comprises a soluble target protein.

55. The bispecific binding agent of any one of the preceding claims, wherein the soluble target protein comprises an inflammatory cytokine, a growth factor (GF), a toxic enzyme, an autoantibody, a target associated with metabolic diseases, or a neuronal aggregate.

56. The bispecific binding agent of any one of the preceding claims, wherein the inflammatory cytokine comprises lymphotoxin, interleukin-1 (IL-1), IL-2, IL-5, IL-6, IL-12, IL-13, IL-17, IL-18, IL-23, tumor necrosis factor alpha (TNF-α), interferon gamma (IFNγ), and granulocyte-macrophage colony stimulating factor (GM-CSF).

57. The bispecific binding agent of any one of the preceding claims, wherein the growth factor comprises EGF, FGF, NGF, PDGF, VEGF, IGF, GMCSF, GCSF, TGF, RANK-L, erythropieitn, TPO, BMP, HGF, GDF, neurotrophins, MSF, SGF, GDF, and an isoform thereof.

58. The bispecific binding agent of any one of the preceding claims, wherein the toxic enzyme comprises a protein arginine deiminase 1 (PAD1), PAD2, PAD3, PAD4, and PAD6, leucocidin, hemolysin, coagulase, treptokinase, hyaluronidase.

59. The bispecific binding agent of claim 58, wherein the toxic enzyme comprises PAD2 or PAD4.

60. The bispecific binding agent of any one of the preceding claims, wherein the neuronal aggregate comprises Aβ, TTR, α-synuclein, TAO, and prion.

61. The bispecific binding agent of any one of the preceding claims, wherein the first binding domain and the second binding domain are each independently selected from the group consisting of natural ligands or a fragment, derivative, or small molecule mimetic thereof, IgG, half antibodies, single-domain antibodies, nanobodies, Fabs, monospecific Fab2, Fc, scFv, minibodies, IgNAR, V-NAR, hcIgG, VHH domains, camelid antibodies, and peptibodies.

62. The bispecific binding agent of any one of the preceding claims, wherein the first binding domain and the second binding domain together form a bispecific antibody, a bispecific diabody, a bispecific Fab2, a bispecific camelid antibody, a bispecific peptibody, scFv-Fc, a bispecific IgG, and a knob and hole bispecific IgG, a Fc-Fab, a knob and hole bispecific Fc-Fab, a cytokine-IgG fusion, a cytokine-Fab fusion, a cytokine-Fc-scFc fusion.

63. The bispecific binding agent of any one of the preceding claims, wherein the first binding domain comprises an Fc-fusion, and the second binding domain comprises a Fc-Fab.

64. The bispecific binding agent of any one of the preceding claims, comprising one or more sequences selected from Table 2.

65. A nucleic acid that encodes the bispecific binding agent of any one of the preceding claims.

66. The nucleic acid of claim 65, wherein the nucleic acid is operably connected to a promoter.

67. An engineered cell capable of protein expression comprising the nucleic acid of claim 65 or 66.

68. The engineered cell of claim 67, wherein the cell is a B cell, a B memory cell, or a plasma cell.

69. A method for making a bispecific binding agent, the method comprising:
i) providing a cell capable of protein synthesis, comprising the nucleic acid of claim 65 or 66; and
ii) inducing expression of the bispecific binding agent.

70. A vector, comprising the nucleic acid of claim 65 or 66.

71. The vector of claim 70, further comprising a promoter, wherein the promoter is operably linked to the nucleic acid.

72. An immunoconjugate comprising:
i) a bispecific binding agent of any one of the preceding claims,
ii) a small molecule, and
iii) a linker.

73. A pharmaceutical composition, comprising the bispecific binding agent, the nucleic acid, the vector, the engineered cell, or the immunoconjugate of any one of the preceding claims, and a pharmaceutically acceptable excipient.

74. A method of treating a disorder in a subject, the method comprising administering to a subject in need thereof, a therapeutically effective amount of the bispecific binding agent, the nucleic acid, the vector, the engineered cell, the immunoconjugate, or the pharmaceutical composition of any one of the preceding claims.

75. The method of claim 74, wherein the disorder comprises a neoplastic disorder, an inflammatory disease, a metabolic disorder, an endocrine disorder, and a neurological disorder.

76. The method of claim 75, wherein the neoplastic disorder comprises breast cancer, B cell lymphoma, pancreatic cancer, Hodgkin's lymphoma, ovarian cancer, prostate cancer, mesothelioma, lung cancer, non-Hodgkin's B-cell (B-NHL), melanoma, chronic lymphocytic leukemia, acute lymphocytic leukemia, neuroblastoma, glioma, glioblastoma, bladder cancer, and colorectal cancer.

77. The method of claim 75, wherein the inflammatory disease comprises inflammatory intestinal disease, rheumatoid arthritis, lupus, Crohn's disease, and ulcerative colitis.

78. The method of claim 75, wherein the metabolic disorder comprises diabetes, Gaucher disease, Hunter syndrome, Krabbe disease, maple syrup urine disease, metachromatic leukodystrophy, mitochondrial encephalopathy, lactic acidosis, stroke-like episodes (MELAS), Niemann-Pick, phenylketonuria (PKU), porphyria, Tay-Sachs disease, and Wilson's disease.

79. The method of claim 75, wherein the neurological disorder comprises Parkinson's disease, Alzheimer's disease, and multiple sclerosis.
